United States Patent Application Publication US 2004/0048254 A1 - sequence listing, part 2

SEQ ID NO: 408 - DNA, 6192 bp, Artificial Sequence
  chemically treated genomic DNA (Homo sapiens)
tttggaggggagatgggaagagttagtttaggaattttttagtttttttcggtttttagttttattttgtttttgtttgtttatcggcggttaggatttcgttaggtttttaggtcgatatagttgtagagtgattttagagtggggtggagggcggaggttttgagaggaggacgggagtttttttaagggattgggatttagcgtttatttcgtcgggaaggaggttcgggatttggtagttttttacgttttgtattgtttggtagggttagtttttgtttttttcgtttttttttaggtttttagagatttaataggtcgcgttggtgttggtggatggaggggaagaattaggggttgggggagagagataagggtggtggtggggggagataagggtggtggcggagggagaagttagagaaaggtaggggagatgagatagagaggagtatagatataaggtaagatagaaaaaatgaagaaatagtttttaagagagaagaaaaggtgggggcggaggggggatatagttatagagggaggttgagaagagagagagagatttagagagtagggagagataaaggtagagattgtgaaagagagagaaatagagatttatagagatagtagagttggaggtagagatagagagataaagtgagagttttttttttagagatggagtggattggtggggtagggataagtggcgggttaggggggtggtgttggtagggagaagcgtttttttttagggttttagagttttttttattttattgtttgattcggtgttttttcggaaagatttttttttttttggcgatttttagtttagtttttttttttatggttttttttttaggtttagtttttatttttgtttttagtttttttttgtttgtttgttttttcgggtttttttttttgttttttttgttttttagttttttttttagtttttttttttttttgtcgtatttggtgtttttgagtttgtgttttttttttttgaagttttttttttgtggttttaaggaaattttttaagttagtttaggttttttatatttgttattattttttattttttatttttgttttagttttttcgaggggatttttgttttaaggagtttttattatttatttttgggggttatgtacgtttagtcgtatagcgttaagtattaggttagcgggattttgtttattttggggtatcgttacgttatgggtgttaaattttttttagaagttgttgggttttacggggggaggggaaattagttgggtgtggtggtgcgtgtttgtggttatagttatttaggagattgaggtggaaggattatttgagtttaggaggtgagatgaaggttattatagtgagtcgttattgtattattgtattagtttgggtaatagagtaagattttgttttaaaaaaaaaagagagagagagaaggttaggtacggtggtttatatttgtaattttagtattttgggaggttaaggtaggtggattatttgaggttaggagttcgagattagtttcgttaatatggtgaaattttgtttttattgaaaatataaaaatgagttgggtatgatggtaggcgtttgtagttttagttattcgggaggttgaggtgggagaattttttgaattcgggaggcggagttgtagtaagttaggatcgcgttattgtattttagtttgggtggtagagcgtgtaattttagttatttaggaggttgaggcgggagaatcgtttgaattcgggaggtagaggttgtggtgagttaagatcgtattattgtattttagtttgggtaataagagtaaaatttcgttgtaaaaaaaaataataataataaaatgaaataaaataaaataaaataagagagagagaagatagatggaatatttaatatataagatgtgtggtttttgggtttagtgagggttgggggattatttttttttatttgttagttttattttaaattatagttatgtaagtagatgggtttttgagaggaggatttttgggttttattttcgtttgatttttgttttttttttgtttgtagagtgggtacgtgaggagttgaatcgggagttgggggttggttaggtattaagtttaggggatcgtattcgttttttttatatcgacgcggttttgtatgaggcgtagcggttgttggcgttggtgtttatgggaatatttcgtatttttatgcggattattcgttttcgagggtatattttgttttaggtgggtatgcgtatggttgttatttatggttttttgtttcggggtttgagttcgggtggtttgttgttagtgtttttttgatttttttttgattttagtgtttttttttttttttttttgtttttatttttttttttttttttgtttttgttttttttttttatttttatttttttgtattttttttttttttttttttttgatattttttttttttttgtatatattttttttttttttttgagatagagtttcgtattgtcgttcgggttggagtgtaatggcgtgattttagtttattgtaattttcgttttttaggtttaagtgatttttttgttttagttttttgagtagttgggattataggtgtttattattacgtttagttaattttttgtatttttagtagatacggggttttattatgttggttaggttggttttgaatttttgatttcgtgatttgttcgtttcggttttttaaagtgttgggattataggcgtgagttatcgtatttagttatgttttttgtattttttaattttttttgtttttttttggtttgtgttttttttttttttgattttatttttgggttttatttgttttatagattttttaattttatttttttttaaggtggttgggataatcgaatgaggtaatatatagagaagtagtttgaaaattgaggagtaagtttaggattaagggaagtttttttgatttttagtttttgttgtagatatatttttttttttgttttttttttttaattttagtgttttttattggagagtagtttcgatgtagaattaaaagggggcgatgtttttttagaaattttagtagtttatgtaagtagtttttttttttatttttattgtagaattaaatttatggtagttaggatttagtgttgttatgttgttattttttttttttttttttttttttttttttttttttttttttcgagatggagtttcgttttgttgtttaggttggagtgtattggcgtgatttcggtttattgtaattttcgttttttaggtttaagtaatttttttgttttagttttttgggtagttgggattataggtgtatgttattatattcggttaatttttgtttttttagtagagatgggtttttattatgttggttaggttggttttaaatttttgattttatgaattgtttgtttcggttttttaaagtgttgggattataggcgtgagttattgtatttggtttatttttttttgttttgtagatggggttttgggtaaattatttttttttttgaattttaatatattttttttttatattagaaataataatagtattaatttgaagttgtaagataatgtttgtaaaataaatattaatttaatttttgggaatcggttttgtgtattaggtagtaataatttaatgatgataatgataggtatttaggtttgaggatttgttttgtattaggggttattttgagtgttttgtatatttattattttatttaatttttaaagtaattttatattattattatgtttattttatagataaggaaattgagagtttgaaaagtttttagaggatttgttaaggttttttagtttgtaaatagtagatttaagatttgaatttagagattatgttttaattattattttttgttttttttttttttttttttttttttttttttttttttttttttttttttttttttttttttttttttttttttttttttttttttttttttttttttttttttttttttttttttttttttttttttttttttttttttttttttttttttttttttttttttttttttttttttttttttttttttgttttttttttttttttttttttttttttgatagggtttttttttgttttttaggttggggtgtagtggtataagtatagtttatagtagttttgaatttttaggtttaagtgatttttttacgttagttttttgagtagttgggataacgggtttatattattatgtttggttaattttttaattttttttagagataaggttttgttatattgtttaggttggttttaaatttttgggtttaaatgttttttttattttagttttttacgtggttgggattataggtatgagttattgtacgttatttaatattttataaatgttgatgttattaggttttgtgaattagtgtttttggtattcgagatttgtattttatattcgaggattaaatggattggggtgggaaggggtttatagttttattattatttttttttagggtacggaggttttttttttttttggttttattttgtatgattttaatatttttaagtatttagaagagtttaatttagatcgttttttggatgtagatggacggtttaggaagtatgaggcgtttttgtttttttttttaggtatttgttgtagttttgggtattataagtaggtgttggcgaattttaggtatttgtgttagttgggggtatttttttgtattttgggtttattgttggtttttttatttgttgtttttttcgtgggtttgggtgtgaggaatattgatttagttttttttttttttttttttttattagggaagcgtgtttgttttggagagggtttggtaaaagcggagtttttttttttttttattattattttataagttttttttttggagagttcgtgttcgtcggatattttgagttttaagtttatcgttagtggtttttttaatatttttttagttttttagttgtaagttcgttttattgatttttattttattacgtagattagatgaaggaaggtaatttggaagtggtgggtgtttaggacggtgtttttagttttaatagtgggtatggatagggttaatgtttttagagtgtatattgtaggtagttatatttatacgtttgtagttgtttttcggagtttgttttacggtttatacgtttatttgatttatgttgttaagatgtataatcgtatatttatatataattataagggttataaagtaattgttgggttagttttttatagatataaatatagtttatttgtaattataagtatatagttaggtaatttattaatttttttggatttgtagtttatacgtgggagtttggttgttatttttataagttatagaaacggttatatatgtttatagtttatacgttttttttatttatcgaattttttagtgtttttgtttttggtgtttggtatagggaatagtatgtttttttcggggttatgttatttagagattgtcgttgtttatggttttaatttatgtttttttttttggttatattatttttttagtttgtgattatcgatgtttatatatttttaattatttgtttatatagttatttacgtacgatatcgttttggttttttagagtatttttttattgagatacgtcgtttttatagaggtatagtttttagttatttttgtaattgtagtttttagttatttttttttaagtattttgattttattaaatgtaaatatatttgggtttgcgattatgtatagagattttggatatacgaggatttttagatcggaggaatatttgtttaattttaatacgtgtttatgtaattacgtggaaagcggtttttgttgtttttttatatatatatatatatttattgatttatagtttttgttcggcgttagagtttttattagatttagtggaaggggttagagattaagtaggggttagtttttaatttattttgttagggagtgagtcggatttgacgttttttgtgatttaagggttcggtttgggaattaaagtttgtttttggtttttagtt

SEQ ID NO: 409 - DNA, 7442 bp, Artificial Sequence
  chemically treated genomic DNA (Homo sapiens)
  unsure 1792, 4861..4862: n is a or g or c or t
aattttgttttaaaaaaaaaaaaatttgtagagatagggtgtttttttgttgtttagattggttttgaatttttggttttaagggatttttttttttattttggttttttaaagtgttgggattataggagtatattttatgttcggttttattcgttattattaaagttataaggggttgggtatggtggtttatatttgtaattttagtattttgggaggttaaggtaggtggattatttgaggttaggaggttgagaatagtttggttaatatggtgaaatttagtttttattaaatatataaaaattagtcgggtatggtggcggacgtttgtaattttagttatttgggaagttgaggtaggagaattgtttgaattagggattggagattgtagtgagtcgagattatggtattgtattttagtttgagcgatagagcgagattttattttaaaaaataaaaattaaaaaataataaagttataaggaaggtatagagagggaaagttatttgtttaaggttatataattagtatatggacgagttagggtttaaaattatgtttttaagtttagtatgttgaattttattttttttaatgaagtaggttttgttattgaaaatataggatatttgatgaggataataataatatataatgttatattattattattattattattattataaaattaatagtagttaaattgtattaagagttttttatatattagattttatgggatagagttatatttttttgatgtgatttattttatagatgaggaagttgaggttttacgaggttaagtaattgttcggaagttataaagttaacgattaggagataggatttggatttaggttttaatttaaaataaagtaggataaggaagttagatgcggtggtttacgtttgtaattttagtattttgggagatcgaggagggaggttcgtttgagtttaggagttcgagaataatttgggtaatatagtgagattttttgagtttataaattgttttttttattagttagttattgcggtatatgtttgtagttttatttatttgggaggttgaggtaggaggattatttgagtttaggagtttaaggttatagtgagttatgattttattattgtattttagtttgggagatagagttagattttgttttaaaaaaaaagtaggataagatttagtaattgagttagatgggaatttaggttttgattagttttattttttttttttagaaagggaaattgaggtttttgagagtaagaaagttgttttaagtttatagatttttagatggaatttcgttttttttttaggattttgagtaggtaaatttttggtttttttttttttaggatgggttggggaaaaagaaatagtagttggggaggagatttgaataggtataaagggcggtttgtatgaggggaaagtggttagatattaagtagaattttttggttttttttgggaagtttttaagatttatttaggggttgttttgcgggtgggggttttttaggagttaaggtttagagaaaggagattttagtttttttcgtttggggtgtaaggagtcggggggagggtgggggtggttattttggtttcgtatttttcgttttcgatattggagggaggttgttgtgggagttgggatttttttgagagtagaagattttgggaaattagagatagttgtagggcgggttgttttttagtttttttttttttttttttttttggtttttgttggtttncggagtacgtttttttatttttttattttattagtttttttttttttagtttatgttttttattttcggatttttagatttttttttttgagtttttttttttttttttagatttggtttttatttttagattttttttaaattttttttttttagattttttttttttttttaatttttttttttttttttagagttgcgtttttttatttagtgttttttagatttttttagattgtgtttttttttttagatatttttttttttttttagatttttatttttttatttagatttttatttttttttttagatttttatttttttttttagatttttatttttttttttaaatttttatttatttttttaaatttttatttttttttttagatgtttatttttttttttagatttttatttttttttttagatttttatttttttttttagagttttatttttttttagatttttattttttttttttaaattttatttttatttttagatttttatttttttttttagatttttatttttttttttaaatttttatttttttttttatatgtttatttttttttttagatttttatttttttttttagatttttattttttttagattttcgtttttttttttagatttttatttttttttttagttttttatttttttttttcgaattttatttttatttttagatttttatttttttttttagatttttatttttttttttaaattttcgtttttttttttagatttttatttttttttttagatttttgtttttttttttagatttttattttttttttttaaatttcgtttttatttttagatttttattttttttattagatttttattttttttaatagattttgttttttttttttagattttttttttttttttttattaaattatttattttttttttagatttattttttttttttagatttttttttttttgatttttttattttttttttaattttagagaattattagtatttttttttttagtagtatcgttttttttagtttttcgaagtttttatcggatttattatatttttttttttttatagttttgttaggttggaattattgtattagttgttttgggatgttaggagtgggataggtttgggtgttttttttattttatttttgagggtttttattttaagtttcgtttttttaaattttagtttttttttttgtgtattgggatagtgttttatattttttttttgtgtttgagggtttttaggggtggggttggatgggtagggaatatagtttttagtttgtttaatcgaattttttttttttttttttgttgtggtttttataatattagtaggtaggggttgttattggttttattttttagaagaataaattgagttttaaggtaggggatggtttgtttgaggttttatcgggagtaaggggtggaggtggaattaatataggtttgtgttcgggatgtttcgttatgaagggggataagggaggtttagagagaggtcgaaaggaagggaaggggtgaggtttttttatatagttattttttatattttgggttaacgatttattcgggtggggttcgagttcggttaaagttttttttcggggttttaatatttatttttaaggttttaggggatatagagatagtaatagagatggggagatagagatagagggcggggtaggagataattagagggaggttaggtaagtttcgaagatagaaggagatcgggggagagaattagagagacgtcgcgtgttttttgggtaagttcggggtgtagtttttatgtttcgttttttgtgtttttaaagttttttttttcgttttttgtgatttagtgattcggatttaattttagcggttgtttcgtttttagggaaattcgggaaagtttcggattttcggggttttatttcggggcggggagagggagaggaggggaggagacggggaagagtttcgtttttttttttttttttttttatttttagtttgagttatgtttttaattcgtttagtttgttttttatttattaattttttttcgaggtgggaggggaagtcggggggaagttaaattgtttttcgtttttgtagtatcggtttcggtcgcgttgattttggtttggtgttcgtgttttttgttattttttttttttttaagatttttgcgtttgtttttatgtttttttttttttgtgtatttaggatttttcgagtatttaatttcgttttcgcgggtttcggtttggtagggtttttaacgcgtgtagagatataattagtggagcgttttttatttttattttatttttagtttttttagatttatagttgatgaggtacgtggagtggtagagatggaagaggggagggagaggaatcgtttttggtcgtttgtcgagtgttagtttttgtttcgggtgcgtttttttatttttattaaggaggaaacggtttagagaggggaagtgtttggttaaggttatttagcgagtaagtgggaatcgagattttaaatttcgttttagagatgttaaggttttttgagagatagagaagtagatagtaattgagaggtagagagatggtgatagatataaagagataaaagaaagagatagagacggaatagagtatatagagataaacgcggggttgcggagagaaatatttatttagataggagaattagagagatagttatagatttagagatagagatgttgagagatagggttagaaagataaaaatagaggtagagagagcggtttttggtagtaggggtggggatagtattttatttttcgatttcgttttttttttttttatttttttttttttttttttttttcgtcgaggtttggttgttttaggcgtcgcgggtcgggagggggtaagcggggcgcggtcggggtcggggcgtagggtaggttgtattttagagcggcgggatagcggcgggtttaggaaatttttggggcgtacgggtggtttcgggggcgcggnnggcggggaggcgggcggtcgttatcgtttcggcgtataaaagtttttttagtttagtcggttgtaggggaagtttcggcgttcgcgaaattattttttcgtgtagtcgagtttagtcgtttttcggtcgtcgtttttcgttattggtttcgtatgtttcgcgggcgtatgtgacgaggggttcgtggattgcgtattcggtttaaggttattggattttcgggcgtcgcgttgtcgtttcgtaagcgttcgttgcgtcgttttttttcggagttcgtcgtttttcgcgggcgttgcgggttttgtcgtttttttggattttttgcgcggcggttgcgatttgtcggcggttttcgggtttttttacggtttggttcgtcggaggcgttttattatttcggtgagtggttttcgagggttcgggtcgggtgggatttatatagagtatagggttattagagttaggaggtagagtttgaggtataaatcggtgtttttttagggatttgggggataagaggatataagtttaggttttaaggatatagatatgagattatcggggagttagtaagttgtgttttgggatttggggatttggggattttggggggtaaagtaggggttgagtgacgtgggggggggggttagggataatgtttagtggtataaatatgggggtgttagggaattagggtatagagtttggtattttaggggtaagaaagtataagtttttaagttagatgtgtagcgttatgaggaagttgagttgggttggagaaattggggttttttgtattttgatattattagaattaaagggagttagggtaatagagattggggttttaaggagatagatattgaggattttaggatgttataattttaggaattaagatatttggagatatgggtattatgaaaatagagatggggttttgagtattttaatatttgggattataaggatttaaggaaatgaattagagttttagggatttagatattagggggttttgaggatttaggagaatagagattcgggtttttgggtatttagttatgtggggttataagtgattagggttttatttgaggttaagattaggtgggtagaagggattaggggattgaggattttaagattgggtaattttgagattttgggtaatttagaggtaggatgaaaattttaggggtttttagatagaaagttttaaggttttaaggtttggtattggagatacgaggatttggaaatttgggagtttaagaatagagggtttataaggattagtagatgacgaagattatatatttttttttttattttatttttatttttgattttaagaaggggtgttttttattatagttgtggttacgttattatttttaattgatttttaaagttgtagagagtcgttttatagagttttaaaattttaggtagtttttgtattttttattttattagcgtgatagttggagagttttaagttatgtgtattaggagttttgttacggttttttagtttttttattttaagagtgagaaagtaggttttagtttttttcgtttgtgtgatgggttggtatggatttgtttgttgttatggttttttcgtttttgtttgtttgtttttgtttttgttttttgagatagagttttgttttgttttgtcgtttaggttggagtgtattggcgtgattttagtttattgtaattttcgttttttaagtttaggggatttttgtgttttagtttttcgagtagttgggattataggtatgtattattatatttggttaatttttgtatttttagtagagatagggttttattatgttgtttagattggtattgaatttttgattttaggtgattcgttcgtttcggttttttaaagtattggtattagaggtatgagttatagcgttcggtttgtcgtggtttttttttaaatagtttgatttaaaattatttatgcgtggtggttagtatttgtaattttagttatttgggaggttgaggtaggagaatcgtttgaatttgggaggtagaggttgtagtggggtaagatcgtgttatcgtattttagtttgggtaatagagcgagattatattttaaaaataatttgaataggtttttggtaatattttttttttgtttttattttttttaaatttattttatatttattttatattttgtatttagtaatttattagttataaaattattttgtagatagtttttggggttttttgttaggtgatgatgggtgtattttttgtttttaagggattttttgtttgattggagattgaggttagaagataagtgataatgagggtgattagttttagagggagaggaagttgttagagtttagaggagggacgtggaagggggtttgttttaggttttgaggattttgtatgggatgtaaaagggatttaggagaaagggtaggtgatattataggagtaaagttttagaagtggggggcgggttgagggtttgtgggtgtggttttatttatgttttttttttgttttttattgtttagg

SEQ ID NO: 410 - DNA, 7442 bp, Artificial Sequence
  chemically treated genomic DNA (Homo sapiens)
  unsure 2581..2582, 5651: n is a or g or c or t
tttggataatggaggatagagaagggatatgggtgaggttatatttatagatttttaattcgttttttatttttaaaattttgtttttgtggtgttatttgtttttttttttgggttttttttgtattttatatagggtttttagggtttaaaataaatttttttttacgttttttttttgggttttggtagttttttttttttttagggttggttatttttattgttatttattttttgattttaatttttaattagataaagggttttttaagaatagagggtgtatttattattatttagtaggggattttagggattgtttgtagagtgattttgtggttgatgaattgttgggtgtagggtgtgggataaatgtagagtgggtttggggagagtggaggtagagaggaggtgttattagaagtttgtttaaattgtttttgagatgtagtttcgttttgttgtttagattggagtgcggtggtacgattttgttttattgtaatttttgttttttaggtttaagcgatttttttgttttaattttttaggtagttgggattatagatgttgattattacgtatgggtaattttagattaaattgtttaaaaaggggttacggtaggtcgggcgttgtggtttatgtttttaatattaatattttgggaggtcgaggcgggcggattatttgaggttaggagtttaatattagtttgggtaatatggtgaaattttgtttttattaaaaatataaaaattagttaggtgtggtggtgtatgtttgtaattttagttattcgggaggttgaggtataagaattttttgaatttgggaggcggaggttgtagtgagttgagattacgttaatgtattttagtttgggcgatagagtaaaataaaattttgttttaaaaaataaaaataaaaataaataaataaaggcgaggggattatggtagtaggtaaatttatattaatttattatatagacggggaaaattgaggtttgtttttttatttttggaataggaaagttgggaggtcgtggtagaatttttgatgtatatagtttgaggttttttagttgttacgttgatggggtggagggtgtagaaattatttaaagttttggggttttgtagaacggttttttgtagttttgggggttaattggggatggtgacgtggttatagttgtggtagaggatatttttttttgagattagggatggagataggatggagagaagagtgtgtggttttcgttatttgttgatttttgtgggttttttgtttttgaatttttaagtttttaggttttcgtatttttaatattaggttttgaggttttgaggttttttgtttggagatttttgaaatttttattttgtttttaaattatttaaagttttagaattatttaattttaggatttttagttttttgattttttttgtttatttgattttgattttaaataggattttgattatttgtggttttatataattgagtatttagaaattcgggtttttgtttttttgggtttttaagattttttggtatttgggtttttggagttttggtttatttttttggatttttgtgattttagatattggggtgtttagaattttatttttgtttttataatgtttatgtttttagatattttggtttttgagattgtgatattttgagatttttagtatttgtttttttagaattttagtttttgttattttgattttttttgattttaataatattaggatatagggaattttagtttttttagtttagtttagtttttttataacgttatatatttggtttaagagtttgtatttttttgtttttaggatattaggttttgtgttttgattttttgatatttttatatttgtattattgggtattgtttttggtttttttttttacgttatttagtttttgttttgttttttagggtttttaaatttttagattttaaggtatagtttattggtttttcgatgattttatatttatatttttggaatttgggtttatatttttttgttttttaggtttttggagagatatcggtttgtgttttaagttttgttttttggttttggtgattttatgttttgtgtggattttattcggttcggattttcgggggttatttatcggggtagtaaagcgttttcggcgggttaggtcgtgggggggttcggggatcgtcggtaggtcgtagtcgtcgcgtagagggtttagggggacgataaggttcgtagcgttcgcggggagcggcgggtttcggggaagggcggcgtagcgggcgtttgcggagcggtagcgcggcgttcgggagtttagtggttttgggtcgggtgcgtagtttacgggtttttcgttatatgcgttcgcggggtatacggggttagtggcgggggacggcggtcggagagcggttgggttcggttgtacgggagggtggtttcgcgggcgtcgggattttttttgtagtcggttgaattgaagggatttttgtgcgtcggggcggtggcggtcgttcgttttttcgttnntcgcgttttcggggttattcgtacgttttaggggttttttggattcgtcgttgtttcgtcgttttgaggtgtagtttgttttgcgtttcgatttcggtcgcgtttcgtttgttttttttcggttcgcggcgtttggggtagttaggtttcggcgggggagggagaggaaaggaggggtggggggagaggaggcggggtcggggggtggggtgttatttttatttttgttgttaagggtcgttttttttgtttttgtttttgtttttttggttttattttttaatatttttatttttgagtttgtaattgtttttttggtttttttgtttgagtaggtgttttttttcgtaatttcgcgtttgtttttgtgtgttttgtttcgtttttgttttttttttttgtttttttgtgtttgttattatttttttgttttttagttgttgtttgtttttttgttttttaggaggttttggtatttttgggacggggtttggaatttcggtttttatttattcgttgggtgattttggttaaatattttttttttttgagtcgttttttttttagtgggagtgaagagacgtattcggggtagggattggtattcggtaggcggttaggaacgatttttttttttttttttttttatttttgttattttacgtgttttattagttgtgggtttaaaggggttgggggtggggtgagggtggggagcgttttattgattgtgtttttgtacgcgttgggggttttgttagatcggggttcgcggggacggggttgggtgttcggaaaattttaggtgtatagagagaaagagatatggagataggcgtagagattttgagagaaagagagatagtaagagatacggatattaggttagagttagcgcgatcgaggtcggtgttgtaggagcggggagtagtttggttttttttcgatttttttttttatttcgaggaggggttgatgggtggggaataggttaggcgggttgggggtatgatttaggttggagatgggagggagggaggagggaggcgggattttttttcgtttttttttttttttttttttttttcgtttcggggtggggtttcgaaggttcggggttttttcggatttttttgggggcggggtagtcgttggggttgagttcgggttattgagttataggaggcggagagggaggttttggggatatagggggcggggtatgggggttgtatttcggatttgtttagggggtacgcggcgtttttttggttttttttttcggtttttttttgttttcgaaatttgtttgatttttttttggttgttttttgtttcgttttttgtttttgtttttttatttttgttgttgtttttgtgttttttgagattttgaaagtgggtattggggtttcgggaagggattttggtcggattcgggttttattcgagtggatcgttaatttaggatgtgagaagtggttgtgtggagaggttttattttttttttttttttcgatttttttttggattttttttatttttttttatggcgaaatatttcgagtatagatttgtgttaattttatttttattttttgttttcggtgggattttagataagttattttttgttttgagatttagtttgtttttttggaaaatgggattaatggtaatttttgtttgttggtgttgtgggggttatagtaagggaagaggggaggaattcggttggataggttgggggttgtgttttttgtttatttaattttatttttggggatttttagatataggagaggggtgtggagtattattttaatgtatagaaaggaaagttgaggtttggaggggcgaggtttagggtggggatttttagaggtagggtgggaaggatatttaagtttgttttatttttggtattttagggtagttggtgtagtggttttaatttagtaggattgtagaggggagaagatgtgatgggttcggtgggagtttcgaagggttgggagagacggtgttgttggaagagagggtgttgatggttttttgaggttggaagagggataaaagggttagaaggaggaggatttgaagaaggaagataggtttgagagagaagtagatggtttagtgggaggagggggagaggatttgaaggaggaggatagggtttgttggaggaggtaagggtttgatggaggaaataagggtttgagggtggaggcgaggtttggagggaggaggtgaaggtttgagggaggagataagggtttgaaggaggagataagagtttgaggaaggaggcgagggtttgagagaggaggtgagggtttgaaggaggaggtgagggtttgaaggtggaggtgaggttcggggggaggagatgaggggttaagggaggaggtgagggtttgagagaggagacgagggtttgaaggaggtgggggtttgagggaggaggtgagagtttgaaggaggagataagtatgtgaggaaggaggtgagggtttgagagaggaggtgagggtttaaaggaggaggtaagggtttgaaggtggaggtgaggtttggagggaggaggtgagggtttgagaggaggtgaggttttgaaggaggaggtgggggtttgagggaggaggtgagggtttgaaggaggagataagtatttgaggaaggaggtgagggtttgagagaataggtgagggtttgaaggaggaggtaagggtttgagggaggaggtgagggtttgaaggaggaagtgagggtttgagtgaggaggtgagggtttgaggggaggggagagtatttgagggagagggtatagtttgaggaagtttgagaagtattaagtgaggggacgtagttttgagggaggaggagagagttggaggggaaagaagggtttgaggaaagaagatttggagagagtttgagggtagaggttagatttgagggagaagaaagaggtttaggggaaaagatttgagggttcgagggtggaaggtatggattaggggaggaggagttggtggggtggaggggtggagaggcgtgtttcgngagttagtagggattaaggggagggaagggaagggaggttgggaggtagttcgttttgtagttgtttttaattttttagaattttttgtttttaggaaagttttagtttttatagtagtttttttttaatgtcgggaacggaggatgcggaattaggatggttatttttatttttttttcggttttttgtattttaggcggaaaggattagggttttttttttttgggttttggtttttggagggtttttattcgtagggtagtttttggatgagttttagaaattttttagaggaggttaggaagttttgtttggtgtttaattattttttttttatgtaggtcgttttttgtatttgtttagattttttttttagttgttgtttttttttttttaatttattttgggggaggaaaggttaggaatttatttgtttaaagttttgagagggaaacgaaattttatttggaagtttgtaggtttgaggtagtttttttgtttttaggggttttaatttttttttttaagaggagagagtagggttggttagggtttaagtttttatttggtttaattattgggttttgttttgttttttttttgagataagatttggttttgttttttaggttgaagtgtagtggtgagattatagtttattgtagttttgaatttttggatttaaatgatttttttgttttaattttttaagtaggtgggattataggtatgtgtcgtaatgattggttaataaaaaaaataatttgtagatttagggggttttattgtgttgtttaggttgttttcgaatttttgggtttaagcgagttttttttttcggttttttaaagtgttgggattataggcgtgagttatcgtatttggtttttttgttttattttgttttgaattgaggtttgggtttaagttttgttttttgatcgttagttttgtgattttcgggtagttatttaatttcgtggagttttagtttttttatttgtagagtggattatattaagaaaatatgattttgttttatggggtttgatgtatagaaggtttttgatgtaatttagttgttattagttttataataataataataataataataatataatattatatattattattgtttttattaaatattttgtgtttttaatagtaggatttgttttattggggaaaatagaatttaatatgttgggtttagagatatagttttgagttttggttcgtttatgtgttagttatgtgattttaggtaggtggttttttttttttgtgttttttttgtgattttattattttttaatttttattttttgagatggagtttcgttttgtcgtttaggttggagtgtagtgttatgatttcggtttattgtaatttttaatttttggtttaagtaatttttttgttttagttttttaagtagttgggattataggcgttcgttattatgttcggttaatttttgtatgtttagtggagattgggttttattatgttggttaagttgtttttaattttttgattttaagtgatttatttgttttggttttttaaaatgttgagattataggtataaattattatgtttagttttttgtgattttaatagtggcgaatggggtcgggtatggagtgtgtttttgtagttttagtattttgggaggttaaggtagaaggaagaattttttgaaattaggagtttaagattagtttgggtaataaggggatattttgtttttataaatttttttttttttgagatagagtt

SEQ ID NO: 411 - DNA, 6816 bp, Artificial Sequence
  chemically treated genomic DNA (Homo sapiens)
  unsure 43, 176, 179, 330: n is a or g or c or t
tatattttattgtattatggagattaaatgagataataagtanaaaagtttatagtatagtatttggtatattttaagtagtttataaatattagttagttaatattatattattattattatggatgaggagtttaagtttggttaattttattagggagagtatgattaattanaanatgtattgggatttttttttttaagtttgagggggattttttttaaattaataatggtttaaataaagaaagggtaggaggagaaatatttattagggttttttaaattatggggggggttcgaatattgggaagggattaaggaaaacgngtgaagggtgggaaatttttttgtttttatttttttaagaggagaggaagagtttttaagaaaaaaaattgggtttttaataaattgtggcgttttttatagatttatataattttaggggggtaatatttttttttggttaaaaaaaaatataagaggggcgaaaaagaaatatattttttttcgagaaaaaaattttttttttggttttatatttaattttttattcgttttatatttaattttttatttcgttttatatttaatcgtttatttggttttatatttaattttttatttggttttatatttaattttttatttgtttttatatttaattttttatttcgttttatatttaattttttattttattttatagttaattttttatttcgttttatatttaattttttattcggttttatatttaattttttatttggttttatattaattttttattcggttttatatttaattttttatttgtttttatattaattttttattcggttttatatttaattttttatttagtttttttattataggtttttaggtttatttcgttttttttattgtcgttatttggtttagtgattggtagttttttggtgtttgattataataatttttttttttttgggttttttgtttgtagtttgaatttagtgaatttattatttttattatagttagagtgatttttttaaaaggtagatttgatttttaatggttttttgttttttttaggttaaaggtcgaattttttagttatttttgattgttatttgtaggattttattattttttggttttttgttatgggtgatgtttttattaagttttggtcgatgtgttgtaagtagaagtaacgtgtagtatttttaggaaatttttttatagaagttgttagatgttagttttttttttttattgtattatattgttaggtttatagtttttgaggatttagaggttgatttttgaaaattgaggggtcgaaagatgatttttaggatcgggttgaaatgggaagggtttttaaatttgaaggttttaagtttggggattaaggtcggggataattataaaaaaggggttggaattttacgggttaaaataaggggggtttaaaaaaatttttattttttggaattgttttcggggggattttgggttttttttggggaagggaaatttgggggggggttttttaaaaagagaattggggtgggttttaaaagttattttgtacgtaatgggtgggtggaagttttaggagtaggggtttttttgtttattatattttggtatttgataaatgtttagatatttatttattagttattattaatggtttttttataaagattttagtgatcgtttttttttagattgagggtttttttgggggtaggaggtatttagttttgtgtaaagattgggtaattagggatgatttagtttagaaatttaagaagataatttattttgtttttatttgtgttggggggaaggttattgaaaataatggaagtttttttaaattgatagtgaatgatattagtaaaatttgataaataatgggttagtgaaaagatggagaagttgtagtttaagttaaatagtttttttttttggttggatatagtagttaaaaatagagagaattgtgtgttttgtataagatcgtttgttaatttaagatattttgttttttttcgtggtgaaaagatagggagggtattattataaaaatttaagatgaaagagagtcgtttttttgtttgatttttatatttatttttttagtttgtaatgggtagggtatatggttaggtggatttaggggttaggtattcgtatatattattagggttgtgatgtatgggtttaggtagaggtgtcgtgggaggggttattgagatagagagtgtgagttgggtagaggaaattagatttgattttaggggttatagagtaatttaaggagataaaatgttgttgaatttttaatagtttattagggagggaatgttttttgtgatttatttaagtggttttatttggtggattatattttgttattggtttttttagttttttttttttttaagaagaggatgtttgtaaattagaagtaataggaataagaaagttatttgaagagttcgaggaggattaaatataagtattcgttatgtaatatttgtaattttttgtaattagtttgtttttttttttatagggggtaaggagattaggatttggtgaggtgtgaattttgggaggtatgaggaagttgggttgagaaagtgaatttttttttggttttttttgagggtgtgtttttagaggtttttttttttaaggggtaagggttagataaatgataatttttaagaggatcgaaaggattgtatatattttgtttcgtgaattagatagtagatattttattatttgtatttaatatggggtagtttagcgattgagtaattgggttgggttggtaatagttattcggttttatttatgaataatagtaataataataatcgtagttaaagtaattttattattagtagttgttatgtgttagatattaggtgttttatataaataatttgaatttatttttatatttttttttgtaattgatattgcgatttttattttttaaatgaggaaatagatgagcggttaaataattggatatgattttaatttattttttgtttgatttaaaaatttttttttattgtgtatttaagttaagtagaaaattggggaggtgtgttagaatttgagaaaagtaaaaatgaatttgaatgtgtggggggattattaatagtagatatgaaagttttaattttttttttgaagaggtaggataaacgttataatttttgtatttatagttaagttggatatatttttaaaaaatagtttgggttggaaggaagtggttagattgggaaggggttgttggagacggttagggagaatggtggaagttattgtttgttttttattttttgtttgtagagagtaaggtattttgatgtatattagattattttagatttttggttgtttgataaagatagtgagaggagataaaaggtatgtgaagtgttggaattatagtattagtgttttttaataaatatttgatgtggtatgaaagtgttttaagtatatttaaagtattaattaaattaggtggagtgagagagggtagtggaataattgtaggatgcgtttggttatttttttttttggttggggtatttatatatttattttgtttagggtgtgaataattttaagttttttttttttgatgtttttttgagtttgtattgttttgtgatagttttaggtatgataaagttttttttttgtagttgatataaattagaatagttttttttatgtgtattttttatattttttttattttttaggttttatgattaatgggtttttttttttgttgtgattatggttgaaagtttttgtttatttatgtatatttttaatcgatattagtttttaatttttttattttgtgatttatgtatttgtttgttttttgtattgagttttgaaggattggaatttgtgtaaatgttatgtataaggagaaggtatatttggtgttattttaagttgtattatttttaaagtttttagaattattatattgagttgtggaaaatatgattttttgtttagattaatggtaggttttttgttatgaggtatatagagtttaaaggtttaggtgtagtaatattagtttgaaatgtttagttatagggtgattagattattaaattgtaattaggttgttataattattgaaaattaaatagtattataataatagaattgtgttttttatattttatatttcgtttaggattatattagtagtttatttagtatatgggtattgagtaatagttgttattttttagaaggtatttatttttattaaaagtgttgggtgagtaatttgatgaaagtatggatatttttttagtggaaaatggatatttatatgatattgtttagagatttggaaattataaaggtttatttttttgaaaattaaagttttatttttaatttttaaaatataaataaaataaaatacgaatagttattataaaatgtttttgttttttttttgaaatagaatgtattagagaaatgaatatgtaaatatttaagaagaaattaaattttgtttttatgtaggtatgtataattggatgaataggtatttaggtaaattagaattaggttataggggtgtttttaggaatttatgattagattgtgatggtttttagtgtagtttttttttatgttagtagatagtttatacgtgtgggaaagttgagtcgttttattgaatttgatagtaatcgtttttgtttttttttttttttttttagaattttttttgtttataagttattaaaaaaaaaagagttaatatgttggtattgttggttggtatttttgtggtttatatcgttattgttattatgttatttgttagtattattgttaatgtgagtaatgtttttttgtttatttatttattgagaaattattcgaatatttatattaagtgtataaaagaagtttaagttatagtttttgttttttatgaatttatagtttagttgtgggaaaataaaataaatatacgtttgttttttaaataattaaataataggaggataaaagtgaatgtttataggagtaattttgttagagttgtaggtggttaagggttggaggatttagtgtagttttttcggtttttagaagagtttttttagtagtaggggtgagtggagtttgaggtgaatttggaggagtggtagatggttgaggttttttttagtgaaagagggaaggtggaaggattatagggatgtatttaggtgggagtgttagtaaaggagtatatgtaggaaggataagttttggttagaggataaggaggatatatatttatgtggttggagtcgaattttttttttttttgagaagtttgattagaaggatagatgggaagaagaggatgttagattgataaatttaaattttgagtaaagagtagtatgtgaaagtggagttttgtaagattaatttagtgttattgaattaattaatttagataaaacgagaaaaaaaaaatggaggtagtgttttttttttttgaattttgggttattttgatttttagtggtggtttatagcgtttaatttgtttttatttgtgttttttttagaaaaaagttagttttttggatttaaaaattaaggttattaattattaggtaggtaaattatggttttagaatttgtttaggtttttattatagttaaagtataagtgagttttaaagtttagatagaagagttttgtaaatattagtgggtgtgattataagtaaggttaattaagaataattgtgataagataattttcgtttacgtgatttttttgttttgtaatttagttattttatatgttaatttttatatttatttagataaatttgataagtttttttaaagtgtattaatgagcgttaaagcgttgcgtatttgtgaattattagtttttaatataaggttaggtatatagttgtttattgaatgaagagtagggattggcgtaggtgatgtatgttttcggttttatttttttagtgtgtgtatttgtgtgtgtgtagataggatattgtatttgtttttttttttagaaggataatttttttttttgggttaggtaggaagggatggcggtattatgattagtttgggggaatttatttaggttattttttagtttttagtagtttttataggaaagtatttgttgtagtattttattattaaattattttgtatgttgtgatagttaagtttgatttttttgtttagatgaaagtggtttattaattattagatttattgttatttttttagtaggttttatgttttttaattgtttttagttggatattttattttttttttggttaattagggatttaaatgaaataattttgttagagtatatgaattgtatatatttaagttagtttttttattttggatttttgttttttagaattttagaattttaaattattgtggttgagttatttttatttttgttaagtcgtgaagaatgtggagtttaaagagggttaggtgatttttttttgggttttatatttttttgtgtttttttttttggtaattttgtgaattttagttttaatcggattttattttcgtttatagataagttgtatagttatagttatagttaaatagaatgtttttattaaaatttgatttcgatgtaagttgatttgttattttatttttaaattagagggttagtttttaattaatattttttttttttttggttttagg

SEQ ID NO: 412 - DNA, 6816 bp, Artificial Sequence
  chemically treated genomic DNA (Homo sapiens)
  unsure 6487, 6638, 6641, 6774: n is a or g or c or t
tttgaaattagaaggaaagaaaatgttaattgaaagttggttttttgatttaaaaataaaataataaattagtttgtatcgggattagattttaataaagatattttatttagttataattatggttatgtagtttatttgtgggcggaaataaggttcgattaaaattgaagtttataaagttgttaagagaagagatatagaagaatgtgaaatttagaaagaaattatttagttttttttgggttttatattttttacgatttaataaaaatggaagtaatttaattatagtggtttaaaattttaaggttttgagaaatagaagtttaggatgaggaaattggtttaggtatgtgtagtttatatattttaataagattgttttatttaagtttttggttaattaggaaaaaagtgaaatgtttaattggaaataattaagaaatataagatttattgggaaaataataatgaatttagtggttaataagttatttttatttaaatagaaggattaaatttgattgttataatatgtaaagtaatttgatagtaaaatattatagtaagtgtttttttgtaggggttattaaaagttgaagggtgatttgaatggatttttttagattgattatggtgtcgttatttttttttgtttggtttaagaaaaggaattatttttttggaagagaaaataagtgtagtgttttgtttatatatatataaatgtatatattggaaaggtggggtcgggaatatgtattatttacgttaatttttgttttttatttaataaataattgtgtgtttagttttatattaggggttggtaatttatagatacgtagcgttttggcgtttattaatatattttgaagaagtttattagatttatttggatagatataggagttgatatatagaatggttaaattataaaataaggaggttacgtgggcgggggttgttttattatagttatttttaattagttttgtttatgattatatttattaatgtttgtaaagtttttttatttgaattttaaaatttatttatattttaattgtgatagggatttaaatagattttgaaattatggtttgtttgtttagtgattggtggttttggtttttaggtttaaggagttggtttttttttgagaaaagtataagtaaaagtaaattgggcgttgtaagttattattagaggttagagtagtttagggtttagagagaaaagatattatttttattttttttttttcgttttgtttgagttagttaatttagtggtattgggttaattttgtaaaattttatttttatatgttattttttgtttaaaatttgaatttgttagtttggtatttttttttttttatttatttttttaattaagttttttagaaggaggggaagttcggttttagttatataggtgtgtgttttttttattttttgattaaagtttgttttttttatatatgtttttttgttagtatttttatttgaatgtatttttatgatttttttatttttttttttttattaagagaaattttagttatttattatttttttaggtttattttaagttttatttatttttgttgttgggaaggtttttttagagatcgaagaagttgtattagattttttagtttttaattatttatagttttggtaggattatttttgtggatatttatttttatttttttgttatttaattgtttgaagggtaagcgtgtgtttattttgtttttttataattgagttgtaagtttatgaagggtaagggttgtggtttaaattttttttgtgtatttgatgtaaatattcgaatgattttttaatgaatgaatgaataaaagaatattatttatattggtaatggtgttaataaatagtataataatagtagcgatgtggattataaagatattagttagtaatattaatatgttggtttttttttttttggtaatttgtgagtaaagagagttttgaaaagaaaaagaaagggataaaaacggttattgttagatttaataagacgatttagtttttttatacgtgtgggttatttgttaatatgaggaagagttgtattaaaaattattataatttaattataaatttttgaaaatatttttgtaatttagttttgatttgtttaagtgtttatttatttagttatatatatttatatggaaatagaatttggtttttttttgggtatttatatatttatttttttaatatattttattttaaaaaaggaataagaatattttatgataattgttcgtattttattttgtttgtgttttagaggttaaaaataggattttgatttttaaagaagtaggtttttataatttttaggtttttgaataatgttatataaatgtttattttttattaggaaaatgtttatgtttttattaaattgtttatttagtatttttaatagaagtaaatgttttttgaagaatagtagttattatttaatgtttatatattgaataggttattaatatgattttgggcgagatataaaatgtgagaggtataattttattattataatgttgtttggtttttaataattataataatttaattatagtttaatggtttggttattttgtgattgagtattttagattagtattattatatttgagtttttgggttttgtgtgttttatggtaggaagtttgttattggtttgggtagagagttatattttttatagtttaatgtgatggttttgggggttttaaaagtaatgtaatttgagatagtattaaatgtgttttttttttgtatatgatatttatataaattttaattttttaggatttaatatagaagataggtaaatgtataaattatagggtgggaggattgggaattaatatcgattaagaatgtgtatggataaataaaagtttttagttataattatagtagagaagggagtttattgattataaagtttaggaaataaaggaagtgtgaaggatatatatgggggaggttattttgatttatgttagttatagaaggagagttttgttatgtttaagattgttataaagtagtgtaggtttagagggatattaaaaggaaagggtttgaggttatttatattttagatagaatggatgtgtggatgttttaattaagggaggagatggttaggcgtattttgtaattgttttattgtttttttttattttatttaatttaattgatgttttgaatgtgtttgaggtatttttatgttatattaggtatttattagagagtattgatattataattttaatattttatatgttttttatttttttttattgtttttattaggtaattaaaaatttagagtgatttaatatatattagggtgttttgttttttgtaagtaaggaatgagaggtagataatggtttttattattttttttgatcgtttttaatagtttttttttaatttggttatttttttttaatttaggttgttttttaggaatgtgtttaatttaattgtgaatgtaaaaattatgacgtttattttgtttttttaggggagaggttggagtttttatgtttgttattagtaatttttttatatatttaaatttatttttgttttttttaggttttagtatatttttttaattttttgtttgatttaaatgtatagtaaaaagagatttttgaattagatagaggatgaattagaattatatttagttatttgatcgtttatttgtttttttatttagaaagtggaagtcgtaatgttaattgtaaagggaaatgtgaggatgaatttagattgtttatgtaaaatatttagtgtttgatatatggtagttattaataatggggttgttttagttgcggttattattattattattatttataagtgaagtcgggtagttgttgttaatttaatttagttatttaatcgttaggttgttttatgttaagtgtaagtaataagatatttgttgtttagtttacgaggtagggtgtatataattttttcggtttttttagaaattgttatttgtttaatttttgttttttaaggggggagatttttaagagtatatttttaggaaagattaggagaaagtttatttttttagtttaatttttttatattttttaagatttatattttattagattttgatttttttgttttttatggggaaaggaataggttgattgtagggaattataaatattatataacgaatatttatgtttaatttttttcgggttttttaaatgatttttttgtttttgttgtttttaatttataaatattttttttttaaaagggggaagggttggaggggttaatgatagaatataatttattaagtgaggttatttaaatgagttatagaaaatattttttttttgataggttgttgggaatttagtagtattttgtttttttgggttgttttgtaatttttaaagttaagtttgattttttttgtttagtttatattttttgttttaatgattttttttacggtatttttatttgggtttatgtattatagttttggtggtgtgtgcgagtgtttggtttttggatttatttgattatatgttttgtttattgtaggttggaagaatggatgtgagaattaagtaaaagagcgatttttttttattttagatttttgtgatggtgttttttttgtttttttattacggaaagaagtaaaatgttttgagttagtaagcggttttgtgtaaaatatatagttttttttgtttttagttgttgtatttagttagaaggaggggttgtttagtttaagttataatttttttatttttttattggtttattatttgttaggttttattaatattatttattgttagtttagaggggtttttattatttttaatggttttttttttaatataggtgaaaatagaatgagttatttttttgagtttttgggttgaattatttttagttatttagtttttatataaagttagatattttttgtttttagggaaatttttagtttgggaggaggcgattattgaggtttttatgaaaaagttattagtggtaattaatgggtaaatgtttgggtatttattaaatattagagtataataaatagaagaatttttgtttttgaaatttttatttatttattacgtgtaaggtagtttttgaagtttattttagttttttttttaaagggtttttttttaaattttttttttttaaaaagaatttaaaattttttcgggggtaattttaaaagataaggatttttttgggttttttttgttttggttcgtagggttttaattttttttttgtaattattttcggttttggtttttaggtttggaatttttaagtttaagggttttttttattttagttcggttttaaaagttatttttcgattttttagtttttagagattagtttttgaatttttagaggttatgaatttggtagtataatgtagtgaagggaaaaaattggtatttgataatttttataaggagattttttgaaagtgttatacgttatttttgtttatagtatatcggttagaatttagtggaggtattatttataataggagattaaggagtgatgaggttttgtaagtggtagttaagaatggttaagaaattcggtttttaatttgaaaaagataagaaattattaagggttaggtttgttttttagaaaggttattttagttatagtggagatagtggatttattgggtttaaattataggtaagaagtttagagagaagagagttgttatggttaggtattagagggttgttagttattgaattaagtaacggtaatgggggaagcgaagtaggtttgaaggtttatgatgagaagattggatgagggattagatgtgggatcggatgagggattgatgtaggaatagatgagggattagatgtgggatcggatgagggattgatgtaggattagatgagggattagatgtgggatcggatgagggattggatgtaggacgggatgagggattggttgtaggatgagatgagggattggatgtaggacgggatgagggattggatgtagaagtagatgagggattggatgtaggattagatgagggattggatgtagggttagatgagcgattggatgtagggcgggatgagggattagatgtgggacgaatgagggattggatgtaggattaaaaagagggtttttttttcgaagaagggtgtgtttttttttcgttttttttgtgtttttttttggttaaaagaaaatattgtttttttaaaattatatgggtttataaagggcgttatagtttattaaaaatttaatttttttttttggaaattttttttttttttttaaaagaataaaggtaaaggggttttttattttttatncgttttttttgatttttttttagtattcgggttttttttatgatttaaagggttttaatgaatatttttttttttgttttttttttgtttaagttattgttagtttagaaaggattttttttaggtttaaaaaaaaaaattttaatgtatnttntgattagttatattttttttaatgaaattgattagatttaaattttttatttataataataataatataatgttgattggttaatatttatggattatttaaaatgtattaggtattatgttatagatttttntgtttattgttttatttaatttttataatgtaataaggtatg

SEQ ID NO: 413 - DNA, 7035 bp, Artificial Sequence
  chemically treated genomic DNA (Homo sapiens)
tttgggtaatataggagaatttgtggtttataaaaaaagaaattcgttgggtatgttggtttgtatttgttgttttagttatttggggcgttgaggtagaggattttaagtttaggagttggaggttgtattgagttcgatcgtattattgtattttagtttgggtgatagagcgagattttgttatttaggttggagtgtagaggttttttataggtgttatttagtatattgtaattttgaattgttggttttaagcgatttttttattttagttttttaagtagttgggattgtaggtttagttaaagttgatttttaattgtagtatttgatggatttgtttttaaaatatttttaaaatgatagtatatataatcggtaatttagatttttagtttgtgttacgtagtaggtgtttagaaaaggtgttttgagagtgtgaattgttgtgagcgttggttgttgttttgtgttgtagtatttttatggtttgggttagttaagagtaggggattgtgttttaggagtaggtttggtttttattgtggtttaggtttattttatttgtttacgtattgttttgagtaaacggagtaaatgttgggggcggggttttttttgagtaagtgtggtgtagggagtgtgtttgtgatggtgattttggttacgtaagtgtttgttttttttttttttttgttttgttatagatgttgaggttaatggaaagttgatggtggacggatggttttgttttgttatttaaaatatttttttgttaggttcggtggtttatatttgtaattttagtattttgggaggttaagggtaggtggattgtttgagtttaggagtttcgagattagtttaggtaatatggggaaattttatttttgttaaaaatagaaaaattggtcgggtatggtggtttatatttgtaattttagtattttgggaggttgaggtgggtagattacgaggttaggagattgatattattttggttaatatagtgaaatatcgtttttattaaaaaaaaaaatataaaaaattagtcgggcgtggtggtatatgtttgtagttttagttatttaggaggttgaggtattagaatcgtttgaatttgcgaagtggaggttgtagtgagtcgagattatattattgtattttagtttgggtaaaagattgagattttattttaaaagaaaaaagaaaaagaaaaattagttgggtgtagtgataggtgtttgtagttttagttatttaggagggtgaggtaggagaatcgtttgaatttaggaggtagaggttgcggtgagttgagattatattattgtattttagtttgggtaatagagtgagatttcgttttaaataaaaaaaaataaaaaaaaaaagagagagaaaaattagtttggtgtggtggtgtatttttgtagttttagttattcgggaggttgaggtgggaggattatttgaatttgggatatagaggttgtagtgagttgagattgtgtttttgtattttagtttggggttatagtgtaagattttgttttagaaaaaaaaaagaaaaaaaaggttggtggggggtttttaggcgcggtggttcgtgtttgtaattttagtattttgagaggttgaggttggtaaattatttgaggttaggagttggagattagtttggattaatataatgaaattttatttttattaaaaatataaaaaattagttgggtgtgatggcgtatgtttgtaattttagttattcgggaagttgaggtaggaaaattatttgaatttgggagatagaggttgtagtgagtcgagatcgcgttgttgtattttaatttaggtaatagagtaagattgtttgaaaaagaaaaaaaaagttattgtgtagaggaattttttattttgtttagatagtaagattattttacgtttgtgtaattttgatttgtatattgacgtttgtaaggaaggtttaatgttgaggatggatagagttattatttttttttgaatcgtattgtaatagttttatcgagatataatttatatattatataatacgtttgtgtagtgtgtattttttattggtttttagtatttttatgtagttgtataattgttattatagttaattttagaataattttattattttaaaaagaagtttttgtattttttagttatgatttttttatttttattattattattcgtttagttttgggtaattagtaatgtattttttgtttttgtagatttgtgaattttagatattttttagaaattgaatcgtataatatgtggttttttgtgcgtggtttttttttgcgtaatggatttgaggtttttttacgttgtagtaggtgttattgttggattttttttgtggtagaataaaatgtttttgtgttaggtagattatatgttatgtatttattagttgatggatatttggagtgtttttgttttttggttgttatgaatagtgttgttttgaatatttacgtataagtttttgtgtgtttatattttattttttttgggtatagatttaggagtggagttgttgagttatatagtatttgagtttaattttttgaggaattgttagattttttttatttaatatttttgttagtagtttatgaggtttttagttttttaatattgttgttgagatttgttattggttgtttattttagttattttagtgggtatgaggtgggtttttattgtagttttgatttgtatttttttggtggttaatgatattgaataaattttttttgagtttgttggttatttgtatattttttttgaagaaatgtttttttagattttttaattatttttaaatggggttattcgttttttttattgaattataagagttttttttttttttttttttttttgagatggagttttattttgtcgttaggttgtagtatagtggcgtaatttcggtttattatagtttttgtttttcgggtttaagtagtttttttgttttagttttttaagttttttaagtagttgggattataggtatgcgttattacgttttgttaatttttgtatttttcgtagagacggggttttattatgttggttaggatggtttcgattttttgatttagtaattcgttcgtttcggttttcgaaagtgttgggattataggcgtgagttattttatttggttaagagttttttatatattttggatttatagtttaaaatattttttttttaggatcgttttgttatttttttgatgaagtataaaatttttaattttgtataatttattttttttttttagtgttttggtgttatatttaagaaattattgttaaatttaaagttataaaaatttatatttttttaggattttagtttatttttgagttaatttttttgtatggttttgaggtagggttttagaggttttttatttttggatttataaaataattaaatttattttttattggttatttttgtgattgttttttaaatttttaatattgagagtataaaattgtggatttgagtttatttttagttgtttatgagtagatttttattatttattttatgattgatttatgtatgagatagggtttttttttgttttttaggttggggtgtagtggtgtgattatggtttattgtaattttgagtttttgggtttaagtagtttttttattttagttttttgagtagttgggattataggtatatacgattatgtttggttaaatttttaggtagagttgtatagatgtttgtcgattatattaataattgtagtaattagaatgtagtaagtaatttgtagaagttaggattgtcgaagggaattggggagagagatggagtaaatagttgggttagaaattagataggaaattaattaattattaggagggttagttaggtattattttttagtttttaatgcgtgagaaattattttgtttgtgatcggtttgtttttagggataaggggattttattcgtttatgtgtgttgtttagtagtatggtgtttagttgaggttgatgtgtggttttagggaaggggtcgtgtgcgtggttacgtttttgggggacgttggatgttttgttttttgcgcggtaatcgtgtacgtttattaggaatgtagttcgtttttttttcggttttttagttgttagttttatgttttgatagatagttattatattggttttttttttcggttatattatgatttttttaaggagtgttttttttatattattgttttaaaaagtttatagtaataattttattttataatgttattaattagaatgaataaaaagtgaaaatttttaagaattatggtaaatagtaaatgtatattagtaattaaggtaataatttttgtttgtatttataagaaatattatgtaggtcgggcgttatgttttatatttgtaattttagtattttgggaggttaaggtaggcggattatttgaggtcgggagtttgagattagtttgattaatatggagaaaattcgtttgtattaaaaatagaaaattagttgggcgtggtggcgtttgtttgtaattttagttatttgggaggttgaggtaggagaattatttgaattcgggaggtggagtttgcggtaagtcgcgattgtgttattgtattttagtttgtgtaataagagtgaaattttattttaaaaaaaataaaataaaaaagataaaaagttattatgtagttagaaattttttaaaatttatttttttagtttttttttgttgaatttttttattagtaaaatgtaagtttttttattttttttttagattttattataaaattttgttacgtttgggaagatttttgaagttttttaaaaagatttttatatagaagggtttgtttagggagttgtttaatatatattttttttagttttttatttttaatttttttatagacggaattagtttttaatgtttggaaattttttattggattattgtgttttaaatagaatttcgtgaatagttttttatttttaagcggaaagaaaggtatttgtgtattgtgaatattttaatattttttttttgtggatggtaagggtaaaaatttttttaataggaaacgggggaggttgttgtttttgtggatttattgggagagagatgataatattttggaaggaaattttattgtttaaaaaataaagttaggtttttgttgtatatgatttagaggagataattgtagaaaattttggaattgaggaagagaattatttttgttttttttgaggggaaatttggttttttttttattttatgaatatgggtggggtttttaggtataggattgtgaagttcgtaagtgtttatttcgttcgttggtgaagttgtgttcgggaagatgagtagagattgtgttttgttaattttttttcgatgagtttgaaaaagtattaggtaaagatatttgtcgttttttttttttgttttgggggtgaaggtggtttcgttagttttgtagggatttttatttttttttgtagttatttttttagtggtgggaattatgggtagttgaagttttgtaggcgggtagttttttcgttagggtagtatggtgttatggggcggtcggagattaagtatttcgttttttttttttgtagtcgttgttttatttataaatgggcgcgttgggataagatggattggattgtgttttttcgttttgagattttagtttatttgttttttaaaattttggtaaaagtagattattttggaaatttttgttatgttttgggtattgatagaaggttttaggagtattgttagttttgttatattttttggtagacggtttttttttaagagataaagtcgtatttagaaatttgagagtacgttgttttgattggttttttattgttatattggatttggatttgagatttagttaggttggagggagaggagttagatgggatatttttaagttgcgaaggggttttgtttagttttgatttagggcgttagagttttaatatggtatttgagaaaaagtgaattgggtgtttttagtttagatttttgggtatagtttatggttgtttgatttaaataattttttagttgttttgtggtttatgtgtaattgtattattatttttgtgggaaaaggattatttcgttttaaaaaaagtttgaaaaaaaaaaaaaaattttaaaattttatattttattattgtagttataagaattgttttgttagggtttatagatgtgttattgttttgtataatagagaaaattttttagtttttaagggttgagggagaaggtggttgtttatttgtagagttgtttgatagaggaaaaggtggtattttatatttttgtttttttttaagtagagagtaaagtaattttttaataaattatttgaaatatttattaaattgtaagtttgaattaggaaaattattgttatggttttagtaagtatttgaaattaaaatgggtgtattttttaaaaatgtgtgataaaatatatatattatgagatttattattagtaatatttagtatatttataatatataatttaaaatggtgtttttatttttggttggaaattattattatatgattgaatagaataggaatatgtttttaatgaataaataagtgtatatacgatttttttattttttagaaaatttttttatttaaggtgaagttaaatagtatttttagtatatttttgacgttaggtgacggtagtgttagaatttcgaggtgaaattttttttatttttgtggttgttagttaggtttatggattatgaaggattggttggttttgtagtttcgtttttttgggttgtttagaatttcggtagttttggttaaagggtttatttgttggtttttgtggatggcgttttgaggttttcgtaatttttttcggttgtttttttaga

SEQ ID NO: 414 - DNA, 7035 bp, Artificial Sequence
  chemically treated genomic DNA (Homo sapiens)
tttgaaagagtagtcggggagggttacggaggttttagggcgttatttatagaggttagtagatgagttttttggttaaaattatcgagattttaggtaatttaggaggacgaggttgtaggattagttaattttttatgatttataagtttgattgataattataggagtaaaagaaattttatttcggggttttaatattgtcgttatttgacgttagaaatatattggaaatattatttggttttattttgagtgagaaaattttttggaaaataaaaaagtcgtgtgtgtatttatttatttattaagaatatatttttgttttgtttaattatatgatgatagtttttaattaaaaataaaagtattattttggattatgtattataaatatattaaatgttattaatggtaaattttatggtatgtgtattttattatatatttttaaaaagtgtatttattttgattttaagtgtttattgaaattataataataatttttttaatttagatttataatttaataaatgttttaagtagtttattggagaattgttttattttttatttggaagaaaataggaatataaaatgttatttttttttttattaggtagttttgtaagtgggtagttatttttttttttagtttttgaagattggaaggttttttttgttatatagaataatggtatatttgtaaattttaataagataatttttgtaattgtagtggtaaaatataaaattttaaggttttttttttttttttaaattttttttaaaacgaagtgattttttttttatagaaatagtaatataattatatataggttatagagtaattgagagattatttaaattaaataattataagttgtgtttaggggtttgaattgaggatatttaatttatttttttttaggtgttatgttgggattttagcgttttgaattaggattggataaaattttttcgtagtttgagaatgttttatttggtttttttttttttagtttggttgggttttaagtttaaatttaatgtgatagtgagggattaattagggtagcgtgtttttaaatttttaggtgcgattttgttttttggggaagaatcgtttgttaaggggtgtagtaggattaatagtgtttttggaattttttgttaatgtttaaagtatggtaagaatttttagagtgatttgtttttgttaggattttagaaaatagatgaattagaattttagaacggaaaggtataatttagtttattttgttttaacgcgtttatttataaatgaagtaacggttgtaggaaagagaaacgggatgtttggttttcggtcgttttatggtattatgttgttttggcgagggggttgttcgtttgtaggattttagttgtttatggtttttattattgagaaggtggttgtaagaaaggatgggagtttttgtagggttggcgaggttatttttatttttaaggtaaaggagaaaggcggtaggtgtttttgtttggtatttttttaggtttatcggggagagattagtagagtatagtttttgtttattttttcggatatagttttattagcgagcggggtgggtatttgcgagttttataattttgtgtttgggggttttatttatgtttatggggtggggaaggggttagatttttttttagggaggataggaatggtttttttttttaattttagagttttttgtaattgttttttttaagttatatgtaatagaaatttgattttattttttaaataatgaaatttttttttagaatattattattttttttttagtaaatttatagaaatagtaatttttttcgttttttgttaaagggatttttgtttttattatttataggaaaagaatgttaggatgtttataatgtataagtattttttttttcgtttggagataaaaggttgtttacgaaattttgtttaaaatatagtaatttaatgaggaatttttaggtattggggattgatttcgtttgtaaaaagattaagggtaaaaagttgagaaggatgtatgttgagtagttttttgggtaaatttttttgtgtggagatttttttagaaaattttagaaatttttttaaacgtaataaggttttgtaatgaaatttgagaggaggatgggaagatttgtattttattaataaaaaagtttaatagagagaaattaaagaaataagttttaaaagatttttaattatatgatgattttttgttttttttgttttgttttttttgagatggagttttatttttgttgtataggttggagtgtaatggtataatcgcggtttatcgtaaattttatttttcgggtttaagtgatttttttgttttagttttttaagtagttgggattataggtaggcgttattacgtttagttaattttttatttttagtatagacgggttttttttatgttggttaggttggttttaaattttcgattttaggtgattcgtttgttttggttttttaaagtgttgggattataggtgtgaggtatggcgttcggtttatatgatgttttttatgaatgtaaatagaaattattgttttaattgttagtatgtatttattgtttgttataatttttagagatttttattttttatttattttaattaatgatattataaaataaaattgttattgtgagttttttaaaataataatataagaaaaatattttttgagaggattatgatatggtcgggaggaaaaattagtatggtgattgtttattaagatatgagattggtagttggagagtcgaggaggaggcgggttgtatttttaatgaacgtatacggttatcgcgtagggagtaagatatttagcgttttttagaggcgtggttacgtatacgattttttttttaggattatatattagttttaattggatattatattgttagataatatatatggacgaatgaaatttttttgtttttaggaataagtcggttataggtagagtggttttttacgtattaggaattaggggatggtgtttggttggtttttttggtaattaattaattttttatttggtttttgatttaattgtttgttttatttttttttttagtttttttcggtaattttaatttttatagattgtttgttatattttggttattgtagttattagtgtaatcggtaagtatttatataattttgtttaaaaatttagttaggtatggtcgtgtatatttgtagttttagttatttaggaggttgaggtgggggaattgtttgagtttaggagtttaaggttgtagtgagttatgattatattattgtattttagtttgggagatagagagagattttgttttatatataaattaattataaagtaaataataaaaatttatttatgagtagttaaggataggtttagatttataattttatatttttaatattggaaatttaaaaaataattataaaaataattaataggaaataagtttgattgttttgtggatttaaagataaaaagtttttagagttttattttaaaattatatagaaaaattaatttaaaaatgaattaaaattttaaaagggtgtaaatttttgtgattttgaatttggtaatagttttttagatatgatattaaaatattagaggaaaaaaataaattgtataaaattaaaaattttgtgttttattaagaaggtgataagacgattttgagagaaaagtattttgaattgtagatttagaatatataaagaatttttggttaggtgaggtggtttacgtttgtaattttagtattttcggaggtcgaggcgggcggattattaggttaagagatcgagattattttggttaatatggtgaaatttcgtttttacgaaaaatataaaaattaatagggcgtggtgacgtatgtttgtagttttagttatttgggaggtttgggaggttgaagtaggagaattgtttgaattcgggagatagaggttgtagtgagtcgagattgcgttattatattgtagtttggcgatagagtgagattttattttaaaaaaaaaaaaaaaaaaaaggaatttttataatttaataaaaaggacgaataattttatttaaaaatgattgaaggatttgaagagatatttttttagaggagatatataaatggttaataagtttaggaaaagtttgtttaatgttattaattattaaggaaatgtaaattaaaattgtaatgagaatttattttatatttattaggatgattaaaataaatagttaatgataaattttagtaatagtgttgaaaaattggaagttttatagattgttgatagggatgttaaatggaaaaggtttggtagttttttagaaggttaaatttaggtattgtatgatttagtaattttatttttaggtttatgtttaagagaaataaagtataagtatataaaaatttgtgcgtgagtgtttagaatagtattatttatagtagttaaaaaatagaaatattttaaatgtttattaattgatagatatataatatgtggtttatttaatataaaggtattttattttgttataaagaggatttagtagtgatatttgttatagcgtggagggattttaaatttattgcgtaaaggaaaattacgtataaaagattatatattatacgatttaatttttaggaaatgtttggagtttataaatttatagagataaaagatatattgttggttgtttagggttgggcggatggtggtggtgaggatagggaggttatggttaaaaggtataagggtttttttttgaggtgataaaattattttgaaattgattgtggtgatagttgtataattgtatgaagatattaaaaattagtggagagtatatattatataggcgtattgtatggtatgtgaattatatttcgataaagttgttataatacggtttaaaagaagataatgattttgtttatttttaatattaaattttttttgtaaacgttagtgtataaattaagattgtataaacgtgaagtaattttgttgtttagatagagtgaaaaatttttttatataataatttttttttttttttttagatagttttgttttgttgtttaggttggagtgtaatagcgcgatttcggtttattgtaatttttgttttttaggtttaagtgatttttttgttttagtttttcgagtagttgggattataggtatgcgttattatatttagttaattttttgtatttttagtagagatggggttttattatgttggtttaggttgatttttaatttttggttttaagtgatttgttagttttagttttttaaagtgttgggattataggtacgaattatcgcgtttaaaagttttttattagtttttttttttttttttttttttgagatagggttttgtattgtggttttaggttagagtgtagaggtataattttagtttattgtaatttttgtgttttaggtttaggtgatttttttattttagtttttcgagtagttaggattataggaatgtattattatattaagttgatttttttttttttttttttttttgtttttttttgtttgagacgaagttttattttgttgtttaggttggagtgtaatggtgtgattttagtttatcgtaatttttgttttttgggtttaagcgatttttttgttttatttttttgagtagttgggattataggtatttgttattatatttagttaatttttttttttttttttttttttgagatggagttttagttttttgtttaggttggagtgtaatagtgtgatttcggtttattgtaatttttatttcgtaggtttaagcgattttggtgttttagttttttgagtggttgggattataggtatatattattacgttcggttaattttttgtatttttttttttagtagagacggtgttttattgtgttagttaggatggtgttaattttttgatttcgtgatttgtttattttagttttttaaagtgttgggattataggtgtgagttattatattcggttaatttttttatttttaatagagatggggtttttttatgttgtttaggttgatttcgaaatttttgggtttaagtaatttatttgtttttagttttttaaagtgttgagattataggtgtgagttatcgagtttggtagaagaatgttttaaatgataggatagaattattcgtttattattagttttttattagttttagtatttatggtagagtaggaggagaaaggaaatagatatttgcgtagttaaaattattattataggtatattttttatattatatttatttaagggaaatttcgtttttaatatttatttcgtttatttaaagtagtgcgtgagtagatggggtgggtttgggttatagtgaaagttaagtttgtttttggagtatagttttttgtttttggttggtttaggttatgggaatattgtaatataaggtagtaattagcgtttatagtaatttatatttttaggatattttttttgagtatttattgcgtggtatagattgaagatttgaattgtcgattatgtgtgttgttattttaaaagtgttttaaaaataagtttattaaatgttataattaaaagttagttttagttgggtttgtagttttagttatttgggaggttgaggtgggaggatcgtttaaggttagtagtttaaggttgtagtgtgttagatggtatttgtgaagagtttttgtattttagtttgggtgatagggtttcgttttgttatttaggttggagtatagtggtgcgatcgagtttaatgtagtttttaatttttgggtttgagattttttgttttagcgttttaagtagttaggataataggtgtaagttaatatgtttagcgaatttttttttttgtagattataagtttttttgtgttgtttagg

SEQ ID NO: 415 - DNA, 24259 bp, Artificial Sequence
  chemically treated genomic DNA (Homo sapiens)
attatttagtatgtgtttattattatgtttgttgattaaatgagagaattagagatattaaatggtttgtttaaggttatacgtttagaggtggaaggagtattagaatttgggttttgttatttttgatttagaattggttttttgttttaggatttatttggttttttagattttagttatagtaaagtttatttttattttagagttttttttattttatgttgaaaagggtttattatttatagggtaatgttttttttttaaagttatatgtttttttttttatttttggaataaggtagagtgataaaggtgatttttaaattatatttgaattagtgtttaagtagtagtttgaaattttaatgattaggttgtattaatgaaattgattatttatatatagtaaatttaagtattttatttatattttatttttaaaatgatttattgaggtaagtagtagtattatttcgatttgatagatgaggaaattgagatttaaagaggtgataattaagttatttttttgtataatattatttagttgataatagtagtgttaggtttgaattttagttggatttttacgatggagtatttagtattagttttttgtttttgtttttgtttttgtttttgtttttttttgaggagttttgttttgttttttaggttggagtatagtggtacgatttcggttgtttgtagttttcgttttttaggtttaagtaatttttttgttttagttttttaagtagttgggattataggtatttattattatattcggttaatttttgtatttttagtagagacggagttttattatgttggttaggttggtttcgaatttttgattttaggtgatttgtttattttggttttttaatgttttgggattataggtgtaagttattatatttggtttttagtattatttttgtggttagttatagtttttatgataatgaatgaatgaataattgagtagataaaatgtttgttatttttaaagattggtaagggggtgttttagaatataatttgtaattgtataaatgttatttggtgtaaatatgggttagatgggaattttttttaattgaaaagaatgataatgttaaatgttggtaaggatgtggagtaattggaaattataaattattggagggaatgtaaaatggtgtaattattttaaaaattaatttagattaggtataaaggtttatatttgtaattttagtattttgggaggttgaggtaggtagatggtttgagtataggagtttaagattagtttgggtaatacggtgagattgtatttttataaaaaaaaaaaaaataagttgggtatggtggtgtatttgtagttttagttatttagaggttgaggtgggaggattatttgagtttaggagatagaggttaaaatgagttaagatttcgttattgtattttagtttgggtgatagagtaagattttgttttaaaaaaaaaaaaaaaagaaaaataatttagtaatttattgtaagttagatatatatttgttatatgatttagtaattttaattttaagtatttattcgagagaaataaaaatatgtttatataaaaatttgtatataaatatttatagtagttttatttatatagttttaaattgaaaataatttaaatgttttttaataaataaatggataaataaatagtgttatatttatattatggaatattatttagtagtaaaaatgaacgaattattggaatatgtaataatatggaaaatttttgagtaaaagaagataaatataaaagaaatatattgtatgattgtatttatgagaaattttagaaaagataaagttaatgtataatggtaaaaagttaattggtgtttatttaaggttatttaagtgtgggaggagttgattgtaataggatataagggaattttttggggtgatagaaatgttttatattttgattggggtggtggttatataggtatatatatttgttaaaatttattaagttgaatatttatgatggtagattttatttacgaaattatgttacgataaagttgatagaagttttgggaatatatataaggattttaattatagtattattgttaggataaaatatttgggaaattgtttatgaataggaatatgtgttagttttttggttttttattattagaatggtaaatttttgaaaggagatgtagttgatgttaatgcggatttttcgatgttttttgggttttaagtaagagttgtatttttttttttggagattttttggtggttgaagtatgtattagggaggttaaaatgttggaaggttagtatttttggagtattttttattcggtgtttaataggagttggtgtgtaaatgttttagttttttcgtttgataggtggagtaattttgaagtgggtatatttttagagatttttgtagaattgaattttagttgtttataatggtaattggttttatgatatttttttttattggttttttttttttttttgttttatttatttatttttttattagtgttttttgtattttttaaataaattatttttatttggatttatgtttagggtttgtttttggggaatttaaattaagattagtggataatattaagggttggtaaagataaggggaaatgatgggagaaagagtggggtagtggcgattttgtaaatatttgttatttttggtaaagtaagtatttaataaaattttaatgtaggacgataaggggacgtgtatgaggatgtttattgtggtattatttatattagtgggaaattgtgtgtaatttaggtgtttatgattaggagaatggataaataaaatgtgaaggatgtaaatagtgattatacgtatagtcgttatttttggtaatatggttggatattaataatagtgatgggggtggcgggagggaatgtataaaagtgaataagtaatattaaatatatatttagaatattatttgtttttataaaaagtatatatagattaggtgtaatgatttatatttataattttagtattttgggaggttaaggtaggaggtttagttgagtttcggagtttaagattagtttgggtaatatagtaagattttatttttatttttttttaagttgtttatgttatattatatcgaatatatttgattttgtttgattttggaagttaagtaggattaagtttggttagtatttggatgggagatttttttaaaatagttagtattgtaggttaaagagaaggaaaaaaggtttatataggtatatatattaaaaatataagagtagggttattgttttttttatttatggtttttttttttttttttattaggggatattttataaatgtttggagatattttgttgttataattagggaggaggatgttatagataattagtgggtagagtttaggaatgttgttaaatattttattatttataggatagtttttcgtaataaagaattatttggtttaaatgttaatagtgttaaatttaagaatttttgtattttttagtttttaggatagttttgttgaatgaattatgaatgaatgaatgaagaaatgattgtggttttgattagttggtagtaacgggaatagagagacgcggtagaatttttgtagttttggagattttggaggtgtgttatatagtatttagggtgatagtttttgttttttttaggagagggtgtgttttgtttttgtttggagttgggtataattttatttatttggggttttagttattttttagttcgattttttttttttttcgattattttttttagtttgggagttttttgagttgttaggaagttagggtggttttttcgggtagggaattttgtatggttatggtggttttttcgagagaggaattttgtatggtgtttgaatggagtaggtttgcggaagagaaatcgttgattatagatttgtttggaagtttcgggtcgcggagttggggagggtcgggttagaagggaggggtcggagtggtggggaaaagagattacgatgttttcggggtagggtaaggtttttttagggtgggttggaatttttgaagattgtggtaggaattttttgataggtggggttaggatttttgaagggtagggttggaatttttggatcggcggtatagatttttgggtattaaaatttttaggcggcgggaggttagatcgcgtaggagtaggagcggtattggaattttggggtttgtgttttaaattttagggtagggttagaatttattgaagtgagagttcggatttttttattgggtagattagaatttttgggggtaagttgagtttaaaaattttttagaggtgggattaaaaattttttggcggggcggggttagtattttgggagttttggagcgggtgttggggtttttagacgggcgggttcgaatttttaggagtgggatttgggattttttggagattggggtaggacgttgggcggtgggatggggaggtgttagggaaagtggagcggaagggatgggggttcgtatttttggtggacgcgttagaagttttttatggatggtgttaatatttttttttttttcgtggagggtttgggattttttttgtaggagacggaggttatgattttcggggagtcggttaggattttggggtggcgtttgaattttcggggaggtgttaggatatttggggcggagttagtttcgtttagggcgcggttaaggcgtttagatggtttgcgggcgttattacgtttttggttttagttcgggagtatattagaggtttagaggcgagtgggaagggatttagatagtgtaggacgagaaacgttcgcggtattaaagttttttagagcgtcgttttcgtttttagttttagaaagttagtttttcggtattggtatttcggaattttaggggttgtcgagttgggggggcgtttaagttgcgaggattcgggttgttcgcgagacgaggagcgggcgtttaggtgagtgtcgcgtataggggatcgggaatattcggttcgcgaggggttttaggaggcggagggagtttaggagtttggggagggttggttacgggtgcggttgggggtagcgaggggagacggaacgtcgggggagtcgcgggtagttcgggggatgaggggtcgatagcgagtggagggtgttttagggaggggcggtattgttgcggattgttggattttcggggaaggggacgttcgggttcgtgtagtgattttatttattatttttttgggtcgtttaggtttttttttttgggggggggcggggattttttttttaatttaaaaaagaaaaagaaggaagggatggggttttatagaattcgggaaggggaaggtttttacggttttcggtgggggtcgggttacgtcgggttggtagttagtttggggaagggggtagttgggcggaggcgtgacgtgcgagttatatttaggtcggttgtagttggtcggttttttgtttttttttttataataggtttaggttaaatttttaaattttttggttttagattatattgtatgtatgttttgttttttttttttttggacgaatttttcgttttcgaattcgtttttttatttgtaaaacggggttatgaagttttttttgtaaggatgtaggaaattggagtatgcgagaggtggtgcgtgtgagagataggttagtgggtagcggagggggtttttaggggtaaattgtttgttggggttggggtagaggatttggtttttttttgtttttgtttttataattgtaggatggggagagtaatagtattttttttatagggttgtttagaggattaattgggtattgaaggggtcgggtagggtggtatacgtttgtaattttagttttttgggaggtcgaggtaggtggattttttgaggtttagagtttgagattagtttggttaatatggtgaaatttcgtttttattaaaagtataaaaattagtcgggcgtagtagtatatatttttaattttagttattcgggaggttgaggtacgagaattatttgaatttgggaggtggaggttgcggtgagtcgagatcgcgttattgtattttagtttgggcgatagagagagattttgttttaaaaaaaaaaaaaaaaaaaaaaaagttattgaaggaaagttttgagaatgttgtttgatagtatataggtttaatgtatgttaatattgttttagttagatatatggtttcgtgtttttagattttagtttatattagtattatttggattgtttgtgaaaatagattgttgggtcgaattttagagtttttgatttagtagttttgtgtaggataatgagaatttttattttcggtgatgttgttgttgttgatttaaggaggatattttgagaattattggggtagtttatgtttggtatagagaaaggttttaatgtttattagttgttttattttatggttttttttttatggtttttttttttttaggggagggggtgataggttaaaatatagaaaagtgaagataataatatattagatgtttcgagaatttattatttagaattaataaataatagtattttgttgtgtttgttttgagattttaaaaaattaatttattaaaagtaatagaaaaaattgaagtttttttattttgtattatttttagttttgtttttttttttttttaggggtaatcgttgttatgagttatagtttttttaggatgtgtttttgaaaatggattgtatataaatgtacgtataaataatacgtaggattgttttgtgtgttttaaaaatgttatttatgtagtggtttatgtttgtaattttagttattcgggaggttgaggtaggagaatcgtttgaattcggggaagtagaagtcgtagtgagtcgagatcgcgttattgtattttagtttggataataaaagcgaaattttatttaaaaaaaaaaaaaaaaaaaaaaaaaaaaaaaaaaaaaaaaaaaaaaaaagttcggacgcgggggtttacgtttgtaattttagtattttgggaggttgagtcgggcggattacgaggttaggagatcgagattattttggttaatacggggaaatttcgtttttattaaaaatataaaaaattagtcgggtatggtggcgggcgtttgtagttttagttattggggaggttgaggtaggagaatggcgtgaattttggaggtggagtttgtagtgagtcgagatcgtgttattgtattttagtttgggttatagagcgagatttcgttttaaaataaaataaaataaaaaattatttaattgtgagatttttttgtaattttgataatggggatagtagaggagtatatttgttttattttattattaagttgttaaaatttatttaggatgagaaatagaaaatagaggttttatttattttttttagttgttgtggagtattttagtaggtaacgattttatagtattttttttttttttgtggataaatatttaagttgtttttaggcgtttattataacgaataatattgataggagtattttggatgtgtagttttcggtttatgtataggtggtttttgaggaaaatattaaaaggttggatggttttttagagagggtatttgttatatttttttttgtgtgagaggagtattgtagtttagaagggttattagggattttggggtagagaagagagaagaatgttgttttgttgattttttagtcgtttttggattaatggttttttttttaggttttatgttttttgttgtaaggtattttatttgttttatttattatgtttggtatttaataagtgtttaagaaaatggaagtatgaattttttgagggaataataattaatatttttatgtatttttatgtagttttttttatgtatttttaaattaatataattagtataatgttatatatagattatttttattttatttatttgtttagtattatattgtagtattttttaggttattaaaatgtttttaaatttttagtggttgtataatattttattgtttgtttgtattataatttgtttaatttttttagtagagtaattttttatatagtttaaaatttttagaaatattttaatcgaggtgaaatttatataattttataaaattaattatatgatttttaaagcgaataatttagtggtatttggtatatttataatgttgtataaatattatttgttagtagtttttaaatatttttattatttttgaaaaaggaaattttgtatttattaagtaattattttttattttttcggtttttggtaattattaatttgttttttgtttttacggattaatttatttaggatatttaatataaatagaagtatattatgtgattttttgtgtttagttttttttatttaatataatgttttttaaggtttatttatatggtggtaattattagtattttattttttttgtggttaaataatattttattgtatggatattttatagtttatttatttatttatttatagatggaaatttaggttgtttttatattttgattattgaaaataatattgttatgagtatgtatgtgtatatatgtatttgtttgagtatttgtttttaatttttttgggtatatatttgaagtagagttattgggttatataaaagttttatttttgtggtcgggtgcggtggtttacgtttgtaattttagtattttgggaggttgaggcgggcggattacgaggttaggagatggagattatttcggttaatacggtgaaatttcgtttttattaaaaaaatataaaaaaattagtcgggtattgtggtgggcgtttgtagttttagttattcgggaggttgaggtaggagaatggtatgaattcgggaggcggagtttgtagtgagtcgagatcgagttattgtattttagtttgggcgatagagcgagatttttttttagaaaaaaaaaaaatagtagttttatttttaattttttgaggaattgttatgttgttttttattattttatatttttatcgtaatatataagggttttaattggttttatatttttgttaatgtttattatgtttatattttattagtattattattattattttaatgggtatagaaagtacgaattttaattttatttaaattaggttgttttttgagggtttttattttagaaagtaaggagaaagttgtttatattttaaggattagttagggtttggattttaaatttttttagaaagtaaattttataagagtataaatatgtttgttttataaattattgtattttttaatatttggtatttggtatatagtagggttttaaaaaaatattgatgggataaacgtaatgaatgttggataatttttttttttttttgtttgagatattttagttgtttttttcgaatatttttttattcgtagcgattatttttaattagttgttaatatttaaatttaggagagtttatataatttggatttttgttttttaaaatattagaagagttagtagttttgagattagaatttacgattttagtgttttttagataattttagtggagttgggggttgttttgggggttatatttgggttgtttagtttgtatagtttttgttaggtttattttttttattcgtagaattttttatatttttatagttatttgagtttttaaattttatttttcgggttatgataaggtttttttttttatagaaaaggaatatgaagggttgggtgcggtggtttattttgtaattttagtattttgggaggtcgagataggtagattatttgagtttaggagttcgagattagtttgggtaatatggtaaaattttgtttttataaaaagtataaaaattagttgggtgtggtggtatatggttgtagtattagttatttaggaggttgaggtgggaggatcgtttgagtatagaaggtgaaggttgtagtgatttgagattgtattattgtattttagtttgggtgatagagtaagattttgttttataaaaagaaaagaaaaggaatgtgaagtttagagagggtaattgatttttttaaagttatatagtaagttagtagtataattttttttagttttttttttttttatatttttttgttgttgtttatttttttttttttatattataagttattaagtaattatttttgtttttttaaataaattttattatatgtattaattatatgttggtttttattttatttttttagtttttttttttataggattgggagtttgaaggtatttttagaggcgtgggtaatgatgtagaagtagtttgtgtttaagtgtaaatgtgttttggttttggtttcggttgtggttttatatgttgtattttttggatggtattgcgttaggacgtgcgtttttgatttttttttcgagttatttttttgagttttaggtattattttgaaattttttggtttaggagatgtaagtgtagttaagagaataggaattttagttttatttttattatagaaatgaagaatagtgggtatagtatagtagacgatttcgagtttgagtgttagttttgttaaagataggttgtgatgtattaggtaaattttttttttttttgagttttagtttttaaatttaaaaaaaaaatggaattgaggttgggtacggtggtttatatttgtaattttagtattttgggaggataaagtaggtggattatttgaggttaggagtttaagattagtttggttaatatggtgaaatttcgtttttattaaaaatgtaaaaattagtcgggcgtggtggcgggcgtttgtaattttagttatttgggaagtcgaggtaggagaattgttggaattcgggaggtacggttgtagtgagttaaggttttgttattgtattttagtttgggttgataatagtaagattttgttaaaaaaaaaaaaaagggggagaattgaggaggatattatttatgatttttgtagtataattttttttatgttaaaatatatatatatatatatatatatatatatatatatatatatattagtttattatggcgtatatgttttagtttgagtttttttagaagtagattttaggtaaggttttaaatgtaaatagtttgagagttgattttagagatttttttaggggagtaaggaagtgaggtagggaataggaggtagttattaaaggtgttttttaagtttagttattattgcgggtatttggagtttaattttattgaggagttttgggagttagggtagaataggtttgagaggtgagggaatcggggtatttgtttattttgttttcgtttttgttttttgttgaaaattatttttggggatgtgataattttttagtattttcggtttgttaagtttatgggtagagtaggtattaatagttatagagaaattttttagataaagagatgaaggtgtcggtagttggaagtttagttagaatgtgtagaaatggtaaagggtagagtgatagaggtagggtattgatagtttttgttttaatatatatgtgtgtaaatgtagaggtagaggttgaggttaaatgttggtagaggatatttgggtggggaaagaggtggttatggagggtttatagaatgagtaatttaagagtgttttaaatgtatttgtaatgttttaattttttttttttttttttttttttttttttttttttttttttttttttttttttttttttttttttttttttttttttttttttttttttttttttttttatttttttttttttttttttttttttttttttttttttttttttttttttttttttttttttttttttttttttttttttttttttttttttttttttttttttttttttttttgttttttttttttttttttttttttttttttttttttttttgagatagggtttcgttttgttttttaggttggagtgtagtgatgttattatggtttatgtagttttaattttttgcgtttaagcgatttttttattttagttttttgagtagttgggattataggtatatgttattatatttagttaataaaaaaaaattttggtagaaatggggttttgttatgttgtttaggttggttttaaatttttcggtttaaacgatttttttgttttgattttttaaagtgttggtattatagatgtgagttattatatttggtttttaatggtttaatttttaataagaaggatgtattaatgttttattaggtggtaaaaggttattttaaaaataaaatatatattttttaaaaaataaaagaaattgagatttggagttttgttaattataaaaaaaatgtaaaaggattagcgtttgtgttattgaggttttgaggattttatttgtggaggataggtttgggggtagttgattttttagtattacggtaggttaaagtgaaaagtggttttggtggtgaattggttattatgttttgtttggagggggaaatttttatttagcggtagttaaggaaagattgttttttttttagtagaagcgagtaaatgtgtattattttttttagtttaaatatatatttatagttattggttttttttttgtttgtttgtttttgttttgagataggattttattttgttgtttaggttggagtgtagtggggtaattttggtttattgtaatttttgttttttgagtttaagtaatttttttgttttagttttttaagtagttgggattataggtatttattattacgtttagttaatttttgtatttttggttgagatagggttttattatgttggttaggtttgttttaaatttttgatattaggtgattcgtttgttgattttaggtgattcgtttgttttagttttttaaagtgttgggattgtaggtatgagttattgtatttggtttatttatagttattgtttagacgggaaatttgggggtatttagtagattaaatggggattttattgttatattttatattttattggttagatggataataaataaattaataggtaatatattaggtgtattagtttaggtttttttttattttttttttttttttttatatttaattttagtatattttgagatagtttaagttttttgagaagtagatttttatagtattaaatgtgtaagaaatttattggaggaaatggttatgagagaaaatgggaagaaattaggagaggataggagagttattagatagtggggtatttttgtttattaatgaaaaagaaaaggaaggaagaaaggaaggaagaagaaaggaataaaaggaggacgtgttttggattgttatgtcgtattttttttttgtagttgttgttttgttttattttgttttttttgagatagagttttgttttgttgtttaggttggagtgtagtggcgtagttttggtttattgtaattttcgtttttcgggtttaagtaattttttttttttagttttttgagtagttaggattataagtatgcgttattacgtttagttaatttttgtatttttagtagagacggggttttattatgttggttaggttggttttgaatttttgattttgtgattcgttcgttttggttttttaaagtgttgggattataggcgtgagttattgcgtttagttgtcgtgttattttaaggaaagtttgttaaggttgttaaggagtttttggttaaagttttttgatagaggttttttagatatgggtgggtttcggtttttttgttatatttagttattggttgggagtagtttatgagagtagtgatggattttagagtatagtagttgagtcgttgattaatttttttagtcgtatttttgtagttggagatttgagaggtgtatttttatggttattacgtttaagaggtggttaggggtatgaagattagttgggaataggttagatagtgatgggagttggggggtagaggattttgtttttgttagggtgatgagggaaggttgttttgagaaggtataattattagagagattgaaggaagtgatggagtttttttgggtgaagaatattttagaaatagaatatgtaatgttttagaggtataagtatagttggtgagttgaagaagagtaaggagggttttagtggaatgattaagggagagttagaaggagatagatttgagaggttgaggaggggattagattgtggaggttttatttattttggagaggatttgggtttttattttaagtgagacggaaattttgggtgggggttgagtagagaaggaatgcgatttgatttatttttttttttttttttttttttgagacggatttttattttgttgtttaggttggattgtagtggtgcgatttcggttttttgtaatttttgattttggggtttaagcgatttttttgttttagttttttaagtagttgggattataggtatgcgttattatgttcgtttaatttttgtatttttagtagagatggggttttattatgttggttaggttggtttttaatttttgattttaggtgatttgttcgttttagttttttaaagtgttgggattataggtgtgagttattatgtttaggatgatttatatttttaaaggtttatttatttgtaagaggtagaatgtagatttaaatttagttttatttgattttaaattttatgttttatttttaaattgttttgttttttgtttgttttagagataaaattattttaagaaggtttatagttgttttggaattttgaaattgattaagtgttttaagagtaatattgaatatgttatgagttttatatgtggttgaataagtgtttggaatataggtattttagagttagttttatggtttagttaggtaaatgattaaagttttgagtttttttttagtgtgttgttttgtcgttcgttatcgtgtgagttagggtttacgtagttttttggggttgttattttatttgtttaatgaagattttgattttttaagtttttttttgtttgtaaaattaaagttttgagttttatgagaaagaagttgaggtttagtaaagggaagacgtgagaagttaggagtgatttttaattgtttattagggatagtagttattcggggataaagatagtttatttagaagatagttagggaattcgaggagagggagttgttgggttttgtatttttaaggtattgtttagggaattggtttttgttgaggaaatattttttttttatttttattgttgagttgttttgagaagggaaagtttttgtaattgaatagttttaagttttgggtttttagcggtttgtttttttgagagttttgtttgggttttttatttttttttttttttttatcgtttatagtttttggggttgattttagtggatgatgataggtaggagagttgagtgttagtttgatttattattgattagtcgggggatttatttttttatgggtttttatttttttatttgaaaaataattttataattttggtttgttgattttagttaagtatgatgaggtttatagagagtagaatataatatatttattatacgaatgtgtatggggggtttattagatattaggtgtttttttttttgaaatatttttgttttgtaatttaggttggagtgtagtggtatgattataatttattgtagttttaattttttaggtttaagtgatttttttattttagttttttaagtagttgggaatataggtatatgtcgttatgtttggttaatttttttgggtagagatagggtttcgatatgttgttaggattagttttgtatttttgggtttaaagtaatttttttattttagtttttaaaagtgttgggattataggtatgagtttttgtatttagtttttataattaggtttttttaaggtatggttttagtgttattagtttaatgaggtttatattttttttatttttatttattttaataggtttagtattattttatttttttttttattaaaatttggtattagggaggtttttgttattagttatttgtatttgagtgtaaattataattttttataagaattttttttgtattgggtaagattttttgatgtttaaagggaaataaatttaatttaaaattggtttaagtagaagaaggaggttattggaaaatttttgagatattagttttaggcgaggtttaatttaaggttgagagtttgtatttttttattttttgggtttgttttgttgttgtaggtttttttttttagttagaaattaagggttggttttcgttggttagaattgaattatatgtttatttttatttttttttttttttttttttttttttttttttgagatagagtttttttttgttatttaggttggagtgtaatggcgtaatttcggtttattgtaatttttattttttaggtttaagtaattttttagttttagttttttaagtagttgggattatagatgtttgttattaagttcggttaattttttgtatttttaatagagatggggttttattatgttggataaatttttgatttttggtgatttatttgtttttgttttttaaagtgttgggattataggtatgagttatcgcgtttatttatttatttttgtttttattattgtaatttttattggtttgatttggttatagatttatttttatagttaggggttggagttaattttattttaatttataaattgagattaggggcggagtaatttttaaaggaaaattggagaattgttgttagaagaaggggggaatggattttatgtaggaaagagttgtagtttttttttttagagaatttttaatttaatattttattttatatttggagaaattgaggtttagagataagttgagatttgtttaatattatataatgagtttatagtagagatgggattataatttagggttttatatttttagtttttgtaggtttttgtttaagtatagaagtttttagaaaattatttttagtttattggatggatgtttaggtaggtttcggttttttttttttgagtttgattttgagagtataggtcgagtttttgagttttttatagttagtatggtaattttgggaagtagttaggtataagtaagttgattttttttattttatttagtagaggttgaggcggtgaggagtaggttttaggtttttagggacggtagtggttcgaggaagtatttttattagggattagtagttttgagtgggtgtgtaattaggtagattgtttttgtttttagagcgtgtttttgaagtatattagatgagaaatgcgtatgtagaagttttatatagttttttatatttttagttatataggattttaggttaagtttgagaagtaaggttttttatttagtaggaaagaaaaataaggtttagagagggtaaatgatttgtttaaggttatatatttagttagtggtagaattgttatttaaatttaagtattttgatttttaagtttagtttttattttgttatattggtggattttaaattttagtgtatatattaattttttgtagaattgttagaattatagattttaggattttatttttagatattggtttatttaatttagagtgtgatttaagaatatgtaagaattagtggagattttttgagtttaaatggtagaaatttaatttaaattggtttaagtaaaattgataatttatttgttcgtggattggaaaaattttgaggtgtataggttttaggtatagttggatttaggtgtttaatttatttttaggaattattttatttttatattttagttttgttgttttttttggtggttttattttaaagtagtttttattttgatgatgttgaggtggtttttaagaattttaggtttttatattttaataatttttatagaaagagggtgttttttttttaatttttgtagtaaaattttagggtagattgttttagtgaggaggacgtatatgtttataattgaattaatttttgtagttagggggttagaggatatgggattttttgattggttaggtttgtgttaagttgttaatttttgaaggtaagggtgggatcggttttattaaattttatgtattaagtgggagaaagttggttttttaaaggaaaatttaggtattgttatttgaagagggatagatgttgaggaggtaggagtaaaagaggttttttagtttttttggttagaatgtttatatgaatcgtttgggaattttgttaaaatgtatattttgatttgggaagtggggattgagattttgtattttttatagtttttttgtgaggttgaggttgttggtttttacgttagttatattttgagtattatattgtatttttaaatttatttaaattattttgttataaggtattttgtagagaggttttgggttatataaattttttttttttattattttttttttatttttattttattttttgtttttaaatttattcgaataatattagtattatttgtttgggaattatttattaatatattatagattttgttgataaattatagttgaagaaattgtttattgtgttttttagtgatttttttttttttttttttttttttttttgatagagttttgttttgttttttaggttggagtgtagtggtacgattttggtttattgtaatttttgtttttcgggtttaagcgatttttttattttagttttttaagtagttgggattataggtgtgcgtcgttatatttggttaattttttttgttttcggtagagttagggttttattatattggttaggtttgtttcgaatttttgattttaagtgatttatttatattagttttttaaagtgttaggattataggtatgagttattgtatttagttttagtgatttttttatgaggagttatagaataaatttttttttgaatttatatttaaaaaatatttgtttttgttaatagataatttgttgtgttttttgggattttatggtgatgttgtataagtttttatttttattttggttattaggaagtttagagataaatttagtatttaatggtagtagtagttttattttgggtttttggtttaataattttttttttttatatggtgtagagtaattttttttgagttttgtagtgttttgtgtatggtttaatattataagtttttttaaattttttttggaagtcggtttttttttggagtatttttgatttttttttaatttttatttatttagattttttttgttttttaaaatttaatttattattttgttgtttaattattattgtaaataggttgttttttatacgaatttattaatatatacgtaggtatataaatttattttagaagagtggtttgatgtatatgtttgtagtttgtattttttatttaataagtattttagtaatttttgtatggttttttttatgtttattattttttagtagtttattttttttttatttttaaaattgtggtaaaatatgtataataaattttttattttaattatttgtaagtgtatattttagtggtatttaatttatttagtatgttgtgtaatttttattattatttatttttataatttattttatttgaaattttatatttattgaatattattaattttttattttttttttttttagtttttggtaattattattttattttttgtattttttaatagttttttagtatgtggtttcggaatgtaattgtgtgtttagttttttttttttaattcggttatagagtaggaatgttttgatgtttttattttttttttttttttttttttgtttcgttttatggtgtttagatatttttattttttattatataaagtatggtacgttaggtatgtagttatttatttattgtgtatgatatttttattgtgtgttaggagatattgggttaagtattgaggaacgtaggtgtgagtattagttttttttgtgttgtagtgatgggagtattttgtttttgtatgtttgtatatggtggttttgagttatagacggttgttgagtatagatggagttatagttgagatgtgttttaatagtaaaatttatattgagatgtgaaggtttagtataaaaaaaaatgtaaagtattttatttataatttttatatttattatatgttaataattttgatatattgggtaaaataaatatattttaaaattaatttatttgtttttttttattttaagaaatttggatgtaaaaatttttttaaaaatgaaaaataggttaggcgtagtggtttatatttgaaattttagtattttgggaggttaaggaggacggattatttgaggttgggagtttaagattagtttgattaacgtggtgaaattttgtttttattaaaaaatataaaaattagttaggcgtagtggtatatgtttgtaattttagttatttaggaggttgagataggagaattatttgaattttggaggtagaggttgcggtgagtggagatggtattatcgtattttagtttgggtaataagagtaaaattttattttaaaaaaataaataagtaaatgaaaattaaaaaaaaataaaaattaaaaataaatttaaaaggaaaataaaaataaagtaaaatgaaaataatttttttttaaaaaaggaaaaaataaaataaaataaaattttaattttaatttttaaaaatttggttgtagaaaattttaatttatatttgtggtttatatgatatttttgggtttagtgattatgaatatggatatttttgatgtttagtttatattaggtagtagatatggtttttttatttagggagataattatattttatataaatttgatttttgttagtgtattatttttagaaaaattatatttttagttgggtatggtggtttatattttagtattttgggaggttaaggtagtaggattatttgaggttaggagtttaagattagtttgagtaatattgtgagatttgttttttttttttgttttttgtttttatagaatataaattttaaaagattagttaggtatggtagtttgtaattgtagttttagttattaaggaggttgaggtgggaggattatttgattttgggaggtcgaggttgtagtaagttatgattatattattgtattttagtttgggtgatagagcgagattgtttttgagaaaataaattatattttattgtgtaaaaatggaatttatgggaattttttattttaaaaaaagcgaatttttttagtgttgtagtatttttaggtttgtgggttagaggaattgtaaattgtgtttgttttatgattcggggtagtgttacgtttgttagtaaatagaaatagttgtggttaatgtttttgtagcgtttattgtatgttgggtatttttatatttattaatttgtttagtgtttattattattttatgaggtagaatttttgttatttttttttagagatggttttggattgtgaatgaatataggttttttgagatttttttttcgggattttgtggttattttgaatatgtatattgattacgtaagtgaagtatataaggtgtttaacgcgtatggattggaaattataagatttatagttgtagattagtgggtgtttagagaggtagagtgagttgttttattttatatagtgttgttttttttagaatatttttatgttgattaaaatatacgaaatgtgatataattttatgttatatatgttatataagatgttcgtttaattttttagaattgtaatatatatttattttaaagagagatgttggttttagttttaaatgtatgtaagtatattataaatttgtgtttaattatgataattttttaaattaatgatttagtattttaagagtttgaatgtgttttttattttatttttaaaagataaataaagtaaaatcgtttaagttttgaggtggtaaattttttttagtttttattagaagaggtaaatttttgtaaataaaaggaatttttttttatttttaaaagtaatttatttaagtttaggagtttggggtttttttttttaaattataaatatatgtttattttaataagataagtataattgagttttaattgttttagaagaaaatggtaattgtgtagagatgagaaaagtaagtatttttttatgtggttgttatagtttgtttttttagtaaatgtgtgtgtatattttgagaaaagaaatgaaatattttttttatttttataattatgttttgattttatttggagtaaatgtgttttgtttaagtatttttaaattaatttaatatagtagtaaagtttgtaagttttatttttaaaatgttttttaaatttgtttaatgtttattttttttttgtttttatattattttgggttattattattttatatttgaataattttggtagattttttatagggtttttttttttgttttttattgtttacgttttatttagttatcggtgggattatttaaagtgtaaattgaattttattatttttttgttagaaattttttattatttttagaataaaatttaaagtttttattggttttataggatatggtggttttgttataattatttttttttttgtttatgagttttagttatatttttttgtttttagtgtttttaatttttttttaagtatatgttagttttagggtttttgtatttgttgttttttttgtttggaatattttttttttagagtgtttttttattggtttttttgtgttatttagatcgtaggttttgtatttttttttttgataggttttttttaaatgttttgtttaaaagagttagatttgttgttttttatagtatttttttttattgtttttatattttttattaatttaatttgttttgttatttatttgttggtttgtttattgtttttgttttttattcggttgtagttgaggttttgagggcgtgaatttgttttttttttttatagtttagaaaagtgtttagtaaattttggttgtgtaaatggatgaatgaattattaaataatttagagagagatagagagaaagagaggaggaagaggaagaggaagaagacgaagaaagaggaggaggagggaggatagaggagggggaaggaggaggaggggaaggaggaggagggggaaggaagaggagggggagtaggaaggaagggagggagggagggagggaaggagttataagtaatttataaattgatattagtaatacggtgttttgataaattagattgtttgagttatgttatgtgattttattttgttatttaatataaaaatggtaatttattatttgataatattgtagtttttttgtagtgtttgttttgagtttgatattgtattgagtatttttttattgtaggttatattattgtttttattttgtcgatgaagatttgagaggtgggtaggggtaggaaagtggttagtgaggtgttggtggggtggaggggttaaggattagttgaggttttttgatttgagagttggtagtgtttatttaatagttttatttgttatatttttgttatttttatgttattttttgaataaatatttattacgttggtttttggtatttacgataatgatagtttgttagttttgggttagtgttgtggtacgtggatatggggaagtttagaggtggtaaggatggagtgggttttatgtggggaggataagggtgtatggagttggtaggggagttaagatcgggaaggttagtgggagttagttcgggggtaggggatttggaatgttagtattagaagattttttcgtatgaggtttttggtaattggggtttattttttttttgtttgttgtagg

SEQ ID NO: 416 - DNA, 24259 bp, Artificial Sequence
  chemically treated genomic DNA (Homo sapiens)
tttgtagtagatagaagggaggtgagttttagttattaagagttttatgcggggaagttttttgatgttggtattttaggttttttgttttcgggttggtttttattggttttttcggttttaatttttttgttagttttatgtatttttattttttttatatggaatttattttatttttgttatttttgggtttttttatgtttacgtgttatagtattggtttagggttgataagttgttattgtcgtgggtattaaggattagcgtgatggatgtttatttagaggatggtatgaggataatagaaatgtaataggtagagttgttgggtgggtattgttagtttttaggttagaaagttttagttgatttttggtttttttattttattagtattttattgattatttttttgtttttatttattttttaggtttttatcggtaaaatggggataataatatgatttatagtggggaaatatttagtgtagtgttaggtttagagtaaatattatagaaaaattgtagtattattagatgataaattgttatttttatattaaataataagatgaggttatataatatggtttaaataatttagtttgttaaggtatcgtattattggtattaatttataaattgtttataattttttttttttttttttttttttttttttttttgttttttttttttttttttttttttttttttttttttttttttttttttttttttttttttgttttttttttttttttttttttttcgtttttttttttttttttttttttttttttttttttttgtttttttttgagttgtttggtaatttatttatttatttatatagttaagatttattgggtatttttttaaattgtgaagaagagaagtaagtttacgtttttaggattttaattgtagtcgaatgggagatagagataataaataggttaataaataaataatagggtaaattgagttaatgaaaagtgtgaggataataagagaggatgttgtggggaataataggtttggtttttttaggtagggtatttggggaaggtttgttagagaaagggatatagaatttgcggtttaaatgatataaaggagttagtgaggggatattttgagggaagagtgttttaggtagagggaatagtaaatgtaaaggttttgaggttggtatgtgtttagagagaagttggaggtattgaaagtaggagagtgtagttgaagtttatgggtagggaagagggtggttgtgataaggttattatattttgtagggttagtaaggattttggattttattttaaggatgatggaaagtttttggtaggagaatgatgggatttaatttgtattttaaataattttatcggtggttgagtgaggcgtggatagtggggagtaggggagggaattttgtgagaaatttgttaaaattgtttaggtatgagatgatggtggtttagggtagtgtgggggtagagaggaggtaagtattggataggtttgggggatattttggaggtagagtttgtagattttgttgttgtattgaattaatttaaggatgtttaaataaaatatatttattttaagtagagttaaaatataattgtaaaagtggaagaaatgttttatttttttttttaaaatgtgtatatatatttgttgagaaggtaggttgtgataattatataaggaagtgtttgttttttttatttttgtataattgttatttttttttaaagtagttagaatttagttatatttattttgttaaaataaatatgtatttgtggtttaaggaaaaaaattttaaatttttaggtttagatgagttatttttaaaaatgaaaaaagattttttttatttataaggatttattttttttggtgggaattgggaaagatttgttattttaagatttgagcggttttgttttgtttgttttttggaaataaaataaggaatatatttagatttttggagtgttggattattaatttgaaaaattattataattaagtatagatttataatgtatttgtatgtatttaaaattgaaattagtatttttttttgagataaatgtgtattatagttttgggaaattaaacgggtattttgtgtgatatatatgatataaaattatattatatttcgtgtgttttggttagtataaagatgttttgggaagagtagtattgtgtgaggtagggtagtttattttatttttttgggtatttattgatttgtagttgtgagttttgtgatttttaatttatgcgcgttgagtattttgtatgttttatttacgtgattaatgtatatatttaagatggttatagggtttcgagggaggggttttagaagatttgtgtttatttataatttaaggttatttttgagaaagggtggtaagggttttattttatagggtggtggtgagtattgagtaagttgatgagtgtaaaagtgtttagtatgtagtaagcgttgtagaaatattaattataattatttttgtttattggtagacgtgatattgtttcggattatgaagtaagtatagtttgtaatttttttggtttataagtttagagatattgtaatattggagaagttcgttttttttaaaatagggaatttttatgagttttatttttgtataataaagtgtgatttgtttttttagagatagtttcgttttgttatttaggttggagtgtagtggtgtaattatagtttattgtaatttcgattttttaggattaagtgatttttttattttagtttttttagtagttgggattatagttataaattattatgtttggttaattttttaaaatttatattttgtagagatagggggtagagagggggggtaggttttataatgttgtttaggttggttttgaatttttgattttaagtgattttgttattttggttttttaaagtgttgggatatgagttattatgtttagttgaaagtgtgatttttttgaaagtgatatattggtaggagttaaatttgtgtaaaatgtgattgtttttttaaatgagagaattatgtttgttgtttggtgtggattgggtattagaaatgtttatgtttatggttattaggtttagaaatgttatgtgagttataaatataagttaaagttttttatagttaggtttttaaaaattaaaattgaaattttattttattttattttttttttttttaaaaaaaaattatttttattttattttatttttattttttttttaaatttatttttagtttttatttttttttaatttttatttatttatttatttttttgagatggagttttgtttttgttgtttaggttggagtacggtggtgttatttttatttatcgtaatttttgtttttagggtttaagtgatttttttgttttagttttttgagtagttgggattataggtatgtgttattacgtttggttaatttttgtattttttagtagagatagggttttattacgttggttaggttggttttgaatttttaattttaggtgattcgttttttttggttttttaaagtattgggattttaggtgtgagttattgcgtttggtttattttttatttttaaaaaaatttttatatttaggttttttaaagtaaaaagaaataagtgaattaattttaagatgtatttattttatttaatatattaaaattattaatatataataaatataaaaattatgaatgagatattttatatttttttttgtattaagtttttatattttagtgtggattttattgttagagtatattttagttatgattttatttgtgtttaatagtcgtttgtggtttagagttattatatgtaaatatgtagagatagaatgtttttattattgtagtataggaaaggttggtgtttatatttgcgttttttagtgtttagtttagtgttttttggtatatagtaggagtgttatgtatagtgagtgaatggttgtatgtttggcgtgttatattttatgtagtaggaagtaaaagtgtttgagtattataagacggggtaaaaaaaaaaaaaaaaaaaaagtaaaagtattaggatatttttgttttatgatcgagttgagaaggggagattggatatataattatatttcgaagttatatattaagaagttattaggagatataaaaagtagaatggtggttgttaggggttgggggaaggggaagtgaggagttagtggtgtttaatgggtgtagagttttagatgaaatgagttatggagatggatggtggtgagggttgtataatatgttgaatggattgaatattattgaagtgtatatttgtaaatgattaggatggaaaatttgttatgtatattttattatagttttaagaatgaaagaaaaataagttattagggagtggtaaatataggaggggttatgtaaagattgttaaaatatttattgggtgaaaaatgtaaattgtaaatatgtatattaaattatttttttaaaatgaatttatgtgtttacgtgtatgttagtaagttcgtataaaaagtaatttgtttataataataattgagtagtaagataatgagttgggttttgaagaatagggaggatttgaatagataaagattgggggaaagttaagaatattttaaagaagaatcgatttttaaaaaggatttgaaggagtttataatattaaattatatatagagtattgtaagatttaaaaagggttattttatattatatagaagggaaagattattgaattagaagtttagggtgggattgttattattattgagtattagatttatttttgagttttttagtagttaagataaaaatggaaatttgtataatattattataagattttaggaagtataataaattgtttgttgatagaaataaatattttttgagtataaatttaaaagagaatttgttttgtggttttttataaaaaggttattggggttgggtgtagtggtttatgtttgtaattttagtattttaggaggttgatgtgggtggattatttgaggttaggagttcgagataagtttggttaatatgatgaaattttgattttatcgaaaatagaaaaaattagttaggtgtggcggcgtatatttgtaattttagttatttgggaggttgaggtaggagaatcgtttgaattcgggaagtagaggttgtagtgagttaagatcgtgttattgtattttagtttgggaaatagagtaagattttgttaaaaaaaaaaaaaaaaaaaaaaaaaaaagttattggagggtataatggataatttttttaattgtgatttgttagtagaatttatagtatgttggtgagtggtttttaaatagatggtgttgatattattcgggtgagtttgggaataggggatggggtgaaggtggggagagaatggtggaagaaagaggtttatgtagtttagggtttttttgtagagtgttttgtgataaagtggtttgagtgagtttagaaatgtaatatggtgtttagagtgtggttagcgtgagaattagtagttttaattttataggggagttgtaagaaatgtagaattttagtttttattttttaaattagaatgtgtattttaataaggtttttaggcgatttatgtgaatattttagttaagaaggttagagaattttttttgtttttgtttttttagtatttgtttttttttagataatagtatttggatttttttttggagaattagtttttttttatttagtgtatgaagtttggtggggtcgattttatttttgtttttaggaattggtaatttgatataggtttggttaattagagaattttatattttttggttttttggttatagagattggtttagttgtaggtatatacgttttttttattgaggtagtttgttttgggattttgttgtaaaaattagggaaaaagtattttttttttataaggattgttgagatgtaggaatttggagtttttggaggttattttaatattattaaggtaaaagttgttttagagtgaagttattagagaggataatagagttgaggtatggagataaagtaatttttgaagataaattgagtatttggatttagttatgtttgaggtttatatattttaggatttttttagtttacgagtaaataaattattaattttgtttaagttaatttgagttgggtttttgttatttgaatttaaaaagtttttattgatttttgtatatttttgggttatattttggattgaatgaattagtatttgggagtgaggttttggaatttgtagttttaataattttataggaaattagtatatatattaaaatttgagatttattaatgtagtagaatgaaggttgaatttgggagttagaatatttgagtttggatagtagttttgttattgattgggtatgtgattttgagtaagttatttgttttttttgagttttattttttttttttgttaaataggaggttttgttttttaggtttggtttgaggttttatgtgattagggatgtgaaggattgtataaaatttttgtatacgtattttttatttaatgtgttttaaaagtacgttttgagagtagaagtagtttgtttggttgtatatttatttaaaattgttgatttttggtaaagatattttttcgggttattgtcgtttttgggaatttgaaatttgttttttatcgttttagtttttgttgagtgaaatgagagaggttagtttgtttgtgtttggttgttttttagggttattatgttggttgtggaaaatttagagattcggtttgtgtttttagagttaagtttaagggggagaggtcggggtttgtttgagtatttatttagtgggttggagatggttttttgggagtttttatgtttaagtagaaatttgtaagggttgagggtgtgaagttttggattgtggttttatttttgttataagtttattgtgtgatgttaggtaagttttaatttgtttttgagttttagtttttttaaatgtgaaatgagatgttggattagaagttttttgaaagaagaagttgtagtttttttttgtatagaatttatttttttttttttttaataatagttttttaatttttttttgggaattatttcgtttttagttttagtttatggattgggatagagttgattttaatttttggttgtagaggtggatttgtgattaaattaagttaatgagagttgtagtaatagaagtagagatgggtggatgggcgcggtggtttatgtttgtaattttagtattttgggaggtagaggtaggtggattattagaggttaggagtttgtttaatatggtgaaattttatttttattaaaaatataaaaaattagtcgggtttggtggtaggtatttgtaattttagttatttgggaggttgaggttggagaattgtttgaatttgggaggtggaggttgtagtgagtcgagattgcgttattgtattttagtttgggtgatagagagagattttattttaaaaaaaaaaaaaaaaaaaaaaaaaaaaagaagtagagatgggtatgtgatttaattttggttaacgagagttagtttttggtttttagttggaaaaaaaggtttgtagtagtaaggtaaatttaagaaatagagaaatgtagatttttagttttggattaagtttcgtttgaagttgatattttagggattttttagtaattttttttttttgtttgagttagttttgagttggatttatttttttttaaatattaaagagttttgtttagtgtagagggaatttttataagggattgtgatttgtatttaagtgtaaatggttgatggtaaagatttttttgatattaggttttggtagaagagaaggtaagatggtattagatttattagagtaggtgaggatgggaggaatatggattttattaagttgatggtattgaagttatgttttaaaaggatttggttatagagattgggtgtaggggtttatgtttgtaattttagtatttttggaggttgaggtgggaggattgttttgagtttaggagtataaggttggttttgataatatatcgagattttgtttttatttaaaaaaattagttaggtatggcggtatgtgtttgtatttttagttatttgggaggttgaggtgggaggattatttgagtttgggaggttgaggttataatgagttgtagttatgttattgtattttagtttgggttatagagtaagaatgttttaaaaaaagaagtatttggtatttaataggttttttatatatattcgtgtaatggatatattatgttttattttttatggattttattatatttggttgaagttaatagattagaattatgaagttattttttagatagggaaatggaagtttatgggagagtgggtttttcggttagttagtggtaggttaaattggtatttagtttttttgtttgttattatttattgaggttagttttagaggttgtgggcgatgaaggggaaggggagaatgaggaatttaaatagaatttttaagaaggtagatcgttgggggtttagggtttaaggttgtttagttataggaattttttttttttagaatagtttagtaatgggggtggggaaaaagtatttttttaataggagttaattttttgagtagtgttttgggggtgtagagtttagtagtttttttttttcgggttttttgattgttttttgaatgaattgtttttattttcgagtgattattgtttttaatagatagttaggggttatttttgattttttacgttttttttttattgagttttagttttttttttatagagtttaaaattttgattttgtaaataggaggaaatttgggagattaaaatttttattggataggtggagtaataattttaagaggttgcgtgggttttggtttatacgatggcgagcgatagagtaatatattaaaggagaatttagggttttgattatttgtttggttgagttatagggttggttttgagatgtttgtgttttaaatatttatttaattatatataaaatttatagtatgtttaatgttatttttgggatatttggttaattttagaattttagagtaattgtgaatttttttggaatgattttatttttaaggtaggtaggaggtagggtagtttgaaaatagagtatgagatttgaagttagatagagttgggtttgaatttgtattttgttttttataaataagtgagtttttaaaaatgtaagttattttgggtatggtggtttatatttgtaattttagtattttgggaggttgaagcgggtagattatttgaggttaggagttggagattagtttgattaatatggtgaaattttatttttattaaaaatataaaaattaggcgggtatggtggcgtatgtttgtaattttagttatttaggaggttgaggtaggagaatcgtttgaattttagagttagaggttgtagggagtcgaggtcgtattattgtagtttagtttgggtaatagagtgagagttcgttttaaaaaaaaaaaaaaaaaaaaaggtaagttagatcgtattttttttttgtttaatttttatttagggttttcgttttatttggagtaaaagtttaagttttttttaaggtgggtaagatttttataatttgattttttttttagttttttagatttgtttttttttaatttttttttgattattttattggagttttttttgtttttttttaatttattaattgtgtttatatttttggggtattgtatgttttgtttttggaatattttttatttagaaaggttttattattttttttagtttttttaatgattgtatttttttagagtaatttttttttattattttggtaaagataggattttttgttttttaatttttattattgtttagtttgtttttagttagtttttatgtttttaattattttttaaacgtggtggttatgaggatgtattttttagatttttaattgtaggagtacgattggagaaattgattagcggtttagttgttgtgttttgaagtttattattgtttttatgggttgtttttagttaatgattgagtgtggtagggagatcgaagtttatttatgtttgggggatttttgttaagagattttggttaagggttttttaatagttttgataaattttttttagaatggtacggtagttgggcgtagtggtttacgtttgtaattttagtattttgggaggttaaggcgggcgaattataaggttaggagtttaagattagtttggttaatatggtgaaatttcgtttttattaaaaatataaaaattagttgggcgtggtggcgtatgtttgtaattttagttatttaggaggttgaggaaggagaattgtttgaattcgggaggcggaggttgtagtgagttaagattgcgttattgtattttagtttgggtaatagagtaagattttgttttaaaaaaaataaaataaaatagaataataattataaaaaaaaaatacggtatggtagtttaagatacgttttttttttattttttttttttttttttttttttttttttttttttttttttattagtggatagaggtattttattatttgatggtttttttgtttttttttggtttttttttatttttttttatagttattttttttaataaattttttgtatatttaatgttatgggagtttgttttttaaaggatttgaattattttagggtatgttgaagttaagtatgaaaaagaaaagaaaaaataaaaaaggatttggattaatgtatttaatgtattatttgttgatttgtttattatttatttgattaataggatatgagatatgatagtaaggtttttatttagtttgttggatgtttttagatttttcgtttaaataatagttataaataggttaggtgtaatggtttatgtttgtaattttagtattttgggaagttgaggtaggcggattatttgaggttagtaggcggattatttgatgttaggagtttgagataagtttggttaatatggtgaaattttgttttaattaaaaatataaaaattagttgggcgtggtagtgggtgtttgtaattttagttatttgggaggttaaggtaggagaattgtttgaatttaagaggtagaggttgtagtgagttaagattgttttattgtattttagtttgggtaatagagtgagattttgttttaaaataaaaataaataaataaaaagaaaattaatagttataaatatatgtttaaattgagaagggtgatgtatatttgttcgtttttgttgggagaggagtagtttttttttggttgtcgttgagtggaagtttttttttttagataggatatggtggttagtttattattagggttattttttattttaatttgtcgtggtattgagagattagttgtttttaaatttgttttttataaatggaatttttaaagttttagtaatataggcgttgatttttttatattttttttataattgataaagttttaggttttagttttttttattttttgaagggtatgtattttatttttaaaatgattttttattatttagtaaaatattagtgtattttttttgttaaaaattaaattattagaggttaggtatggtggtttatatttgtaatattagtattttgagaggttaagataggaggatcgtttgagtcgaggaatttaagattagtttgggtaatatggtaagattttatttttattagaatttttttttattagttgggtgtggtggtatgtgtttgtgattttagttatttaggaggttgaggtgggaggatcgtttgagcgtaggaggttggggttgtatgagttatgatagtattattgtattttagtttgggagatagagcgagattttgttttaaaaagaaaaagaaaaaaaaaagagagagagagagagaagtaagaaagaagaagaaggaggaggaggaggaagggaaagaagaaagaaagaaagaaagaaaaaagaaagaaagagagagagagaaagaagaaaggaaggaagagaagaagaaagtggaggaggaggaagaggaggaggagaaggggggaaggaaagaagggaaagaagaaagaaaagaaaagaaaggagggagggagggaaggaaggaaggaagattaaaatattatagatatatttaagatatttttggattatttattttataagttttttatggttatttttttttttatttagatattttttgttagtatttggttttagtttttgtttttgtatttatatatatgtatgttgaagtagaggttgttagtgttttgtttttattattttgttttttattatttttgtatattttggttggatttttagttgtcggtatttttatttttttgtttgagagatttttttgtggttattggtgtttgttttgtttatgggtttggtaagtcgaaagtgttagagaattattatatttttaggagtagtttttaataaaagataggagcgagaatagggtggataaatatttcggtttttttattttttaagtttgttttattttggtttttagagttttttagtgggattgagttttaggtgttcgtagtggtaattgggtttagaagatatttttaatgattattttttgttttttgttttatttttttatttttttaggagggtttttggaattagtttttaaattatttgtatttgaaattttgtttagggtttgtttttggagaaatttaaattaagatatatacgttatgatggattagtgtgtgtatgtgtgtgtgtgtgtgtgtgtgtgtgtgtgtgtgttttgatataaaaggaattgtgttgtaggaattatgagtagtattttttttagtttttttttttttttttttttttgatagagttttgttgttgttagtttaggttggagtgtagtggtaagattttggtttattgtaatcgtgtttttcgggttttagtaatttttttgtttcggttttttaagtagttgaaattataggcgttcgttattacgttcggttaatttttgtatttttagtagagacggggttttattatgttggttaggttggttttgaatttttgattttaggtgatttatttgttttgtttttttaaagtgttgggattataggtgtgagttatcgtgtttagttttagttttattttttttttggatttgggaattgaggtttagaaagggaagagatttgtttagtgtattataatttgtttttggtagagttggtatttagattcggggtcgtttattgtattgtatttattgttttttatttttatggtagagatgaggttgggatttttgtttttttggttgtatttatattttttgggttaaaggattttagggtgatgtttggaatttagggaggtgattcgaagggagagttaggagcgtacgttttagcgtagtgttatttagaggatgtagtatgtgggattatagtcggggttaagattagggtatatttatatttaagtataggttgtttttgtattattatttacgtttttgaaagtatttttaaatttttagttttgtgggggaggaaattggagaaatggggtggggattaatatgtggttggtgtatgtggtggggtttgtttagaaaggtagaagtgattgtttgatgatttgtggtataaaaaaagaaaaataaataataataaaaagatgtaagaaagaaagaggttgagagagattgtgttattaatttgttgtgtgattttgggaaagttaattattttttttaggttttatatttttttttttttttttttatgagatagggttttgttttgttatttaggttggagtatagtggtgtagttttagattattgtaatttttattttttgtgtttagacgatttttttattttagttttttgagtagttggtattatagttatgtgttattatatttagttaatttttgtattttttgtagagatagggttttgttatgttatttaggttggtttcgaatttttgagtttagatgatttgtttgtttcggttttttaaagtgttgggattatagggtgagttatcgtatttagttttttatgttttttttttataaaaaaggaagttttgttatgattcgaagggtggggtttgaaaatttaaatgattatagggatgtggagggttttgcggatgaggaaagtgggtttggtaagggttgtgtaagttggatagtttaggtgtagtttttagggtagtttttagttttattgaggttgtttgaagagtattggagtcgtgggttttagttttagggttgttaatttttttaatgttttaggagatagaaatttagattatgtgagtttttttgagtttaaatgttagtaattaattaaaaataatcgttgcgggtggaggggtgttcggggagggtagttgaaatattttaggtaagggagggaggaggttgtttaatatttattgcgtttgttttattagtgtttttttgaggttttattatgtgttaggtgttaggtgttagaagatatagtggtttataggataaatatgtttgtgtttttgtagaatttattttttagaagagtttaaagtttaagttttggttagtttttagaatgtagataattttttttttattttttgaggtaagagtttttagagggtagtttggtttgaatgagattaagattcgtgttttttgtatttattagaatggtaataataatattaataaaatataaatatagtaggtattggtaaggatgtgaagttaattgaaatttttgtatattacggtgggaatgtaaaatggtggaaaatagtatagtagttttttaaaaagttaaagatagaattattgttttttttttttttgagaaggagtttcgttttgtcgtttaggttagagtgtagtggttcgatttcggtttattgtaagtttcgtttttcgggtttatgttatttttttgttttagtttttcgagtagttgggattataggcgtttattataatgttcggttaatttttttgtatttttttagtagagacgaggttttatcgtgttaatcgggatgatttttattttttgatttcgtgattcgttcgttttagttttttagagtgttgggattataggcgtgagttatcgtattcggttatagagatagaatttttatatgatttagtaattttattttaggtatatatttaaaggaattgaaaataggtgtttaaataaatatatgtatgtatatgtatgtttatagtagtattatttttaatggttaaaatgtggaaataatttgaatttttatttgtggataaatgggtaaataaattgtggaatatttatataatggaatattatttggttataaagggaataaagtattaatagttgttattatgtggatgaattttggaaaatattatgttaagtggaagaagttagatatagaaagttatatagtatgtttttatttatgttaaatattttgaataaattagttcgtagaggtaaaaagtagattggtggttgttaggggtcgggggaatggggggtaattgtttaatgggtataaagtttttttttttaggggtgatggaaatgtttaggagttattgataggtagtgtttgtataatattgtgaatatattaaatattattgaattgttcgttttaaaaattatatagttaattttataaagttatgtgaattttatttcgattaaaatatttttaaaaattttgaattatataaaagattgttttgttagaaaggttaagtaaattataatataggtaaatagtggaatattatgtagttattaaaaatttaagaatattttaatgatttggaaaatgttataatgtaatattaagtaaataaataggataaaaataatttatgtgtagtattatattaattatgttaatttaaaagtgtatagaaaagattatataaagatatatgaaaatattggttattgtttttttaaaaggtttatgtttttatttttttgaatatttattaagtgttaggtatagtgagtaaggtaagtgaagtgttttatagtagagaatatgaggtttgaaagaaaggttattgatttagagacggttgggagattagtagagtaatattttttttttttttttgttttagagtttttggtgatttttttgggttatagtattttttttatataaaggggagtgtgataggtgttttttttggggagttatttagttttttggtgttttttttaagaattatttgtatatgggtcgaaagttatatatttaggatgtttttgttaatattgttcgttgtagtgaacgtttaggaataatttgagtatttatttataggggaaagagaaatattgtagagtcgttatttgttgggatattttatagtagttggaaggaatgaatgaggtttttattttttattttttattttgggtagattttgataatttaatgataagatggggtaaatatgtttttttgttatttttattgttagaattgtagaaaagttttataattagatagttttttgttttgttttgttttgagacggagtttcgttttgtggtttaggttagagtgtagtggtacgatttcggtttattgtaagttttatttttagggtttacgttatttttttgttttagtttttttagtagttgggattataggcgttcgttattatgttcggttaattttttgtatttttagtagagacggggttttttcgtgttagttaggatggtttcgattttttgatttcgtgattcgttcggtttagttttttaaagtgttgggattataggcgtgagttttcgcgttcgggttttttttttttttttttttttttttttttttttttttttttttttttttaggtggagtttcgtttttgttgtttaggttggagtgtaatggcgcgatttcggtttattgcgatttttgttttttcgggtttaagcgatttttttgttttagtttttcgagtagttgggattataggtatgaattattgtatagatagtatttttaaagtatataaaataattttacgtgttgtttatgcgtatatttatatgtaatttatttttagaggtatattttggaaggattgtaatttatgatagcggttgtttttggggagggagagaaataggattgagagtgatataaggtggggagattttaattttttttgttatttttagtaaattaattttttaaaattttaaaataaatataataaaatgttattatttgttaattttggatggtggattttcgggatatttaatatattattatttttatttttttgtattttaatttgttatttttttttttaaaaaaaaaaggattataaagagaaaattatgggataaggtaattgataggtattgaggtttttttttgtgttaggtataggttattttagtggtttttaaagtgttttttttggattagtagtagtagtattatcggggatggaagtttttattgttttgtatagagttattgaattagaaattttaggattcggtttagtaatttgtttttataagtagtttaggtgatgttgatgtaggttaaagtttgagaatacggggttatatgtttagttagggtaatgttaatatatattaagtttgtgtattgttagatagtatttttaaagtttttttttagtaatttttttttttttttttttttttttgagatagagtttttttttgtcgtttaggttggagtgtagtggcgcgatttcggtttatcgtaatttttattttttaggtttaagtgattttcgtgttttagtttttcgagtagttgggattaaaggtgtgtgttattacgttcggttaatttttgtatttttagtagagacggggttttattatgttggttaggttggttttaaattttagattttaagagatttatttgtttcggttttttaaaaagttgagattataggcgtgtgttattttgttcggtttttttagtatttaattaattttttaaataattttgtgaaggaggtattattattttttttattttgtagttgtgaaaatagaggtaaagaaaggttaaattttttattttagttttaataggtagtttgtttttagaagtttttttcgttatttattagtttgttttttatacgtattatttttcgtatattttaattttttgtatttttgtaagaaagattttatagtttcgttttatagatgaggaaacgaattcggaggcggagaattcgtttaaggaggaaagagatagggtatgtatgtagtgtggtttggggttaggaggtttgggggtttgatttagatttgttgtgggaggaggggtagagagtcgattagttgtagtcggtttgggtgtggttcgtacgttacgttttcgtttaattatttttttttttaagttggttgttaattcggcgtgattcggtttttatcgggaatcgtaagggttttttttttttcgggttttgtgaagttttatttttttttttttttttttttttaaattaaaaaaaaaattttcgtttttttttaagaaggggaatttggacggtttagagaagtggtggataaagttattgtacgggttcgagcgttttttttttcgggaatttagtagttcgtaatagtgtcgtttttttttagggtattttttattcgttgtcgattttttatttttcgggttattcgcggttttttcgacgtttcgttttttttcgttgtttttagtcgtattcgtagttagttttttttaggtttttgggtttttttcgttttttgggatttttcgcgggtcgggtattttcggttttttgtgcgcggtatttatttgggcgttcgtttttcgtttcgcgggtagttcggattttcgtagtttgagcgtttttttagttcggtagtttttgaggtttcggggtgttagtgtcgggaaattgattttttagaattagaggcgggggcgacgttttgaggggttttggtgtcgcgggcgtttttcgttttgtattgtttgagtttttttttattcgtttttaagtttttgatgtgttttcgagttgggattagggacgtggtggcgttcgtaggttatttgggcgttttagtcgcgttttgagcgaggttaatttcgttttaagtgttttaatattttttcgaagatttagacgttattttaggattttaatcggtttttcgagggttataattttcgttttttgtaagaaggattttaaattttttacgaagagaaaaaaaatattagtattatttataggaggtttttaacgcgtttattaaggatgcgaatttttatttttttcgttttattttttttaatatttttttattttatcgtttagcgttttattttagtttttaaaggattttaaattttatttttagggattcgaattcgttcgtttaagaattttagtattcgttttaaggtttttaagatattaatttcgtttcgttaaaggatttttaattttatttttgaaggatttttaaatttaatttgtttttaaagattttaatttgtttagtggaaggattcgaatttttattttagtggattttaattttgttttaagatttagaatataaattttagggttttaatatcgtttttgtttttgcgcgatttaatttttcgtcgtttaagagttttaatatttaggggtttatatcgtcggtttaaagattttaattttgttttttagagattttaattttatttattaagggatttttgttatagtttttaaagattttaatttattttggaaaggttttattttatttcggaagtatcgtgattttttttttttattatttcgattttttttttttggttcggttttttttaatttcgcggttcgagatttttaggtaggtttgtggttagcggtttttttttcgtaggtttgttttatttagatattatgtaaagtttttttttcgaaggaattattatggttatgtaaagttttttgttcgaaggaattattttggttttttggtagtttagaggatttttaagttgggggaggtggtcgggggaggggaggagtcgggttggagggtgattgaggttttaagtggatgggattgtgtttagttttaggtaagggtagaatatatttttttttggaaaagataggggttattattttaaatgttgtgtaatatatttttaaaatttttaaaattataagaattttatcgcgtttttttattttcgttgttattagttgattaggattatagttatttttttatttatttatttataatttatttagtaaagttgttttgggggttggggaatgtaggggtttttaaatttggtattattgatatttgggttaggtaattttttgttgcgggggattgttttgtgaatgataggatgtttaatagtatttttgggttttatttattagttgtttatagtatttttttttttagttgtgataataaaatgtttttagatatttgtaaaatgttttttggtggggaaggggggaagaattatgaatgagaaagataatgattttatttttatgtttttggtatatgtatttgtatgggttttttttttttttttttagtttatagtgttaattattttgagggggttttttatttaagtattaattaggtttgattttgtttagtttttaagattagataagattagatgtgttcggtgtggtatggtatagataatttaaaaaaaaatagagatggggttttgttgtattgtttaggttagttttgaatttcggggtttaattgaattttttgttttggttttttaaagtattgggattataggtgtgagttattgtatttagtttgtatgtgttttttataaaaatagataatgttttgaatgtatgtttaatgttatttatttatttttgtatattttttttcgttatttttattattgttgttaatatttagttatgttgttaaaggtagcggttgtacgtgtagttattgtttatattttttatattttatttatttatttttttagttatggatatttagattgtatataattttttattagtgtaaatagtgttatagtggatatttttatatacgtttttttatcgttttatattagaattttgttaagtatttgttttgttaagaatgataggtgtttgtagaatcgttattgttttatttttttttttattatttttttttatttttattaatttttggtattatttattggttttaatttgagttttttagaagtagattttggatatggatttaagtgaaaatagtttatttaggagatgtagaagatattggtaggggagtaggtggatgagatagggaagggagggaagttagtaaaaaggaatattatgaagttagttattattgtgggtaattggagtttaattttgtagggatttttggagatatatttattttagggttattttatttgttaggcgagggagttggggtatttatatattaatttttgttggatatcggatgaggggtattttaggggtattgattttttagtattttggtttttttggtgtatgttttagttattagagggtttttaggaagagaagtgtagtttttatttaaggtttagggggtatcggagggttcgtattagtattagttatatttttttttaaaagtttgttattttgatagtaaagagttagagagttgatatatgtttttgtttatggatagttttttaaatgttttgttttgatagtaatgttgtaattgaaatttttgtgtatgtttttaaagtttttgttaattttatcgtgatataatttcgtgaataaaatttattattataaatatttagtttgatgagttttggtaaatatatatatttgtgtaattattattttaattaagatatagaatatttttattattttaaaaagtttttttatgttttattgtagttaattttttttatatttaggtagttttaggtaagtattaattggttttttgttattatatattagttttgttttttttagaattttttataaatgtagttatatagtatgttttttttgtgtttgtttttttttatttagagattttttatgttgttgtatgttttagtagttcgtttatttttattgttgagtagtattttatagtatagatgtaatattatttgtttatttatttatttgttgagagatatttgggttgtttttaatttggggttatataaataaagttgttataaatatttatgtataagtttttgtgtaggtatatttttatttttttcgggtaaatatttaggattggaattgttgggttatatagtaagtgtgtgtttaatttgtaataaattgttgaattgttttttttttttttttttttttgaggtagggttttgttttgttatttaggttggagtgtaatggcgagattttggtttattttaatttttgttttttgagtttaagtgatttttttattttagtttttgagtagttgggattataggtatattattatgtttagtttattttttttttttttgtagagatatagttttatcgtgttgtttaggttggttttgaatttttgtgtttaagttatttgtttgttttagttttttaaagtgttgggattataggtgtgagtttttgtgtttggtttaaattggtttttgaagtggttatattattttgtattttttttagtgatttatgatttttaattgttttatatttttgttaatatttggtattattattttttttaattaaaaaaagtttttatttaatttatatttgtattaaataatatttatataattataaattgtattttaaaatatttttttattagtttttgggggtggtaaatattttgtttatttaattatttatttatttattgttatggagattatagttgattataaaagtggtgttaagggttaggtgtggtggtttatatttgtaattttaggatattgggaggttaaggtgggtagattatttgaggttaggagttcgagattagtttggttaatatggtgaaatttcgtttttattaaaaatataaaaattagtcgggtgtggtagtgggtgtttgtaattttagttatttgggaggttgaggtaggagaattgtttgaatttgggagacggaggttgtagatagtcgagatcgtattattgtattttagtttgggggataaagtaaaattttttaaaaaaaaataaaaataaaaataaaaataaaaataaaagattggtgttaaatgttttatcgtaggagtttaattagagtttaaatttggtattgttgttattaattgggtaatgttgtataaagaggtgatttgattgttatttttttgagttttagtttttttatttgttaagtcggaataatattattatttattttagtgggttattttgagaatgaaatataagtaaagtgtttaggtttgttatatatagatggttaattttattagtatagtttaattattaagattttaaattgttgtttaggtattgatttaagtataatttggaaattatttttgttattttgttttgttttaaagataaaagaaggagtatatgattttaaaaaggagatattgttttgtgggtagtggattttttttaatatggaataaaaggaattttgaaatgagggtggattttgttgtgattgaagtttggagaattaagtgagttttggggtaggaggttaattttagattaggagtaataaggtttagattttagtgttttttttatttttagacgtgtagttttgagtaagttatttgatgtttttgatttttttatttggttaataaatataataatgggtatatattgggtaat

SEQ ID NO: 417 - DNA, 5413 bp, Artificial Sequence
  chemically treated genomic DNA (Homo sapiens)
taggagaattatttgaatttgggaggtggaggttttagtgagttaagtttatattattgaattttagtttaggtgatagagtgagattttgtttgttttttttttttttgagatggtattttgttttgttatttaggttagagtgtaatggcgtggttttagtttattgtaatttttatttttatggtttaagtaatttttttgttttagttttttaagaagttgggattataggcgcgtattattacgtttagttaatttttgtatttttagtagagatagggttttattatgttggttaggtttgtttcgaatttttgattatgtgatttgttttttttagttttttaaagtgttgggattataggtatgagttatcgcgtttagtcgagattttattaaaaaaagaaaaaagaaagaaataggagtttaaagtaaaggagattaattatttagttttatttttttattttttaaagtaggagttggtaggatagaattgtgtattggtgaaagtgtttttaagtattaaattaagttaatatttatgtgagtttatgagaaatggatgaagagttttatttgatagaagaggaaaagtgaggtttaggaggaatgattttagtaaagttatatagtaagtgttaaaattgttatttgaatttaggtttttaattatggggatagttttttgagttttgttaatgagaaatttttattgttttttgtttttatttagatttagtatgaattttttttttttgttttttttttgttttttttttttagatagagtttttgttatttaagttggagtgaatagtgcggtggtagtggtaggatttaggtttattgtaatttttattttttgagtttaagtaattttttagttattatgtttagttaattttttttttttttttttttttgtatttttagtagagatagggttttattattgttggttaggttggttgttttgaatttttgattttaggtgatttatttattttggttttttaaagtgttgggattataagtatgagttatcgtgtttagtttgtttttttgagatggagtttcgttttgttatttaggttggagtgtagtggtttgatttcggtttattgtaatttttgtttttcgggtttaagtgatttttttgttttagttttttgagtagttgggattataggcgtgtgttattatgtttggttaatttttgtatttttagtagatacggggttttattatgttggttaggttggttttgaatatttgatttcgtgatttattcgttttagttttttaaagtgttgggattataggaatgagttatcgtgttcggatttttttttttttttttttttttttttgagacggacggaattttattttgttgttaggttggagtgtaatggcgtaatttcggtttattgtaatttttattttttgggtttaagcgatttttttgttttagttttttgagtagttgagattataggtatttgttattaagttcgattaatttttggatttttagtagaggtagggttgtattatgttggttaggatggtttcgattttttaattttgtgatttattcgttttggttttttaaagtgttgggattataggtgtgagttatcgcgtttggtttttttttttttttttttgagataggttttcgttttgttatttaggttggagtgtagtggtataatcgtagtttattgtagttttgagtttttgggtttaagtgatttttttgttttagttttttaagtagttggaattataggtatgttttattatatttggttaattttttgattttttttttagagatgaggttttattatgttgtttaggttagtttggaatttttgagtttgaatggttttattgttttagttttttaaagtgtcgcgattatagatgtgagttattacgttcggttagtaattttagttttgttttattttaaataggttgtgtgattttaagtatatttttgtgggttttagtttgtttatttaaaattagaggtttagttaggtatggtagtttatgtttgtaattttagtattttgggaggttaagaaggaaggattatttgaagttaagaatttgagattagttcgggtaatatagtaatatttttatttttagaataaataaaaaattatttgggtttagtggtgttagttatttaggaggttgaagttagaggattatttgagtttaggagtttgaggttttagtgagttaggattgggttattgtattgtagtttgggtaagagagtgatattttattttaaaaataaattaataaataataaaattggagattaggtttgttggtttttaagatttttgtagatgggagattttatgtattaatattgtatgttttagttgatatttattaattaattttgggtgttggtggtttttagataaataaattatagtttttgtttttgatgaatttttatttttattaaaggtatgggagaggtagtgggattttggggttgatatgtaaattagtaattatggaattttgtgtttaagttgattattgaggtttgaatagaatgttgtaggagattggggtgagagggaagtaaagagtattgggaagtttttagattaggtgatatttaggttaggtgtttgtaattcgagtattttgggaggttgaggtaggagaattgtttgaggttaggagttcgagattagtttggttaatatggtgaaattttgtttttattaaaaatataaaagttagttaagcgtgatggtgtatgtttgtaattttaattatttaggaggtcgaggtaggagaattgtttgaatttgggaggtagaggttgtaggaaaaaaaaaaaggtaatattttagttgagttttgaaggttgagttagaatttagtagttggataaaagagagtatgtcgattgggttcggtggtgtatgtttataattttagtatttggggaggttaaggtaggaggattgtttgagtttaggagttcgagattagattgggtaatatagtgagattttatttttataaaaaaataattagttgggtatgatggtgtgtatttttagttttagttattggggaggttgaggtgggaagattgtttgagtttaggaggtttaaggggattgcgttattgtattttagtttgggagaggaagggagattttgttttaagagagagagagaaagagagagagagagagaaagagagagagagagagaaagagagagagagagagaaagagagagagagagagagagagagagcgagagagcgtacgtattttaaagtagggagaattataagtataaaggtattaagtaagaaaatagtatggggtgtttgggaaaggtaagaatagtttagaatataggttgtgtgtgtgggggtgtgtgggggtgtttgtgtgtgggtgtttgtgtgtgtgtgagtgtgggtgtgtgggggtatttatggaggggatgtttgtgtgtgtgtgtaaggtgagtgtgtggatgtgtgtatgggtgtgggtgagtgtgtggaggtgtttgtgtgtgtgtatgaatgtgtgttggggaggggagaatgtgtgtgtgtggggtgagtgcgtgtgtgtgggggtgaatgcgtgtgtgtgtgtatgtgggtgtgattgtgtgggtgtgtggacgagtgtgtgtgtttttgggtgtgggagtttgtgtgtgtagggggagtatgtatagggtgtgtgtatgaatgtgtgtgtgggtacgtgtgtgagagtgggtgtttgtgtgtggggggtgagtgtgtgtggtgggggggtatttgtggagggtgagtgtatgtgtttattgagtgtgagtgtgggtgtttgtgtgtgggagggtgagtttgtgtgtgagtgtgtgggggagtatttgtgaggggtgagtgtgtgtgtttatgtgaaagtgtgtgtgtgtggatgtttttgtggaggtgggatagggggtgtttttgtgtgtgtgtgtgagagtgtgtgtgtgtagggtgtgtatatgtatagggtgtgtgtgagtgtgtgtgtgtgagagagtgtgtgtgtggtagaatagattgcggaggtggattttattttgatatgaaaggtttggaatgtatggtatattaaattttgaggatagcgttttttaagtattttgaggagtagttttagagaaggaggagttgtagggatttcgggggttttaaagtgagggttttattttgttttaggtaaaataggtatatatttattattttatttatggagttttgtttgattttattagataaaaaatttttattgttaaaataggtaaataaataaaaaaaaagttatggttaatagagttattggagggttttttgttggggagaagtaagttcgtgtttgaaggaattttgtgagatgattgtgggttgtgtgaggggaatagcgggggtttgatggtggatttcgggagtagaagttttttttttagtttttttagttagataggggaattataataggaggtgtggcgtgtatatttttttagtaggggagggtttgataagttaggttttttttaggtttgggaaagtgtgtgttatttttaggaggtggtttttttaatatagggtattggtagagggagagggagggggtagaggtaggaagtgggtaattagattaataaaggtgtttgtggcggtttgtttattttaggtgggagggtggggttagggtttaggggtcgtgtgtgaatttatttgtagtttgagggtttagagggagtatcggtttggagttgggattttttattttagtttttttgtggttggtgaatggggattttaggattttataattttaggtatttttggaattttttagggtaaggttttattatatttgatgttgggggagtagattttgggggagtttttttagtttttttttttatttttttagggattatgggttgtggttgtagtttatattcggaagatgattggatggaaaatatcgatgtgtgtgagaattgttattattttatagttttattggatggtaagggtacggtaagaggcgagataggggttttggtgagggagttgggtagagaatgtaatttaggagaaagaaatgattagtattataggtttttgaaagaatagagtggtttttttttttgaaatatagaaaggaaaagaggtttagagaggggaagggaattttttaagattatatagaaagtagttggtaaatttagggataatatttaattaggttggagaggttgagagtagagtaggggggaagggggttagggtttgatttaattttttgttttttgattttatttttattttttattttatagt

SEQ ID NO: 418 - DNA, 5413 bp, Artificial Sequence
  chemically treated genomic DNA (Homo sapiens)
gttgtggagtgggggatgagggtggggttagaaagtagaagattgggttagattttggttttttttttttttgttttgtttttagtttttttagtttggttagatgttatttttgagtttattaattattttttgtgtgattttaggagattttttttttttttttgggtttttttttttttttgtattttaggggagagggttattttatttttttaagggtttgtagtgttggttattttttttttttgggttgtattttttatttaatttttttattaaggtttttgtttcgttttttatcgtgtttttgttatttagtgggattatgggataatggtagtttttatatatatcgatgttttttatttagttatttttcgggtgtgagttgtagttatagtttatggtttttgagggaatggaagagggggttgaaggggtttttttaagatttgtttttttaatattagatataatggggttttgttttggaaagttttaaaagtatttgagattgtgagattttgggatttttatttattagttatagaaaagttaaaatagggggttttagttttaaatcggtgttttttttgagtttttaggttataagtaaatttatatacggtttttgagttttagttttatttttttatttgggatgggtaaatcgttataggtatttttgttagtttagttatttattttttgtttttgttttttttttttttttttgttagtattttgtgttgggaggattattttttagagatgatatatatttttttaagtttgggagagatttgatttattagatttttttttattggagaggtgtgtacgttatattttttattataatttttttgtttagttgaggaggttgagaaagaggtttttgttttcgaagtttattattaagttttcgttgttttttttatatagtttatagttattttatagggtttttttaaatacgggtttgtttttttttagtagaaaattttttagtgattttgttggttataattttttttttgtttatttgtttgttttagtagtggaaattttttgtttgatgaaattaagtagaattttatagataaagtgataaatgtgtgtttgttttgtttgaagtagagtggggtttttattttgaagttttcggagtttttgtagtttttttttttttagggttgttttttagagtgtttggaaagcgttgtttttaaagtttaatgtattatgtattttagattttttatattaagatgaaatttattttcgtagtttattttgttatatatatatttttttatatatatatatttatatatattttatatatatatatattttatatatatatatttttatatatatatatagaggtattttttattttatttttatagaggtatttatatatatatatttttatataaatatatatatttattttttataggtatttttttatatatttatatatagatttatttttttatatataggtatttatatttatatttagtaaatatatatatttattttttataagtgtttttttattatatatatttattttttatatataggtatttatttttatatacgtatttatatatatatttatgtatatattttatatatattttttttatatatataggtttttatatttaggaatatatatattcgtttatatatttatatagttatatttatatatatatatatacgtatttatttttatatatacgtatttattttatatatatatatttttttttttttaatatatatttatatatatatataggtatttttatatatttatttatatttatgtatatatttatatatttattttatatatatatataggtattttttttatagatatttttatatatttatatttatatatatataaatatttatatataggtatttttatatatttttatatatatagtttgtgttttgaattatttttgttttttttaaatattttatgttatttttttatttaatgtttttgtatttgtggttttttttgttttgaaatgcgtgcgttttttcgtttttttttttttttttttttttttttttttttttttttttttttttttttttttttttttttttttttttttttttttttttttttttttttttgagatagggttttttttttttttttaggttgaagtgtagtggcgtaatttttttagattttttgggtttaagtaatttttttattttaatttttttagtagttgagattaaaggtgtatattattatgtttagttgattatttttttgtagagatgaggttttattatgttgtttagtttgatttcgaatttttgggtttaagtaatttttttgttttggtttttttaaatgttaggattataggtatgtattatcgaatttagtcggtatgtttttttttgtttaattgttgaattttaatttaatttttaaggtttagttgaaatattattttttttttttttttgtaatttttattttttaggtttaagtaatttttttgtttcggttttttgagtagttgggattataggtatgtattattacgtttggttaatttttgtatttttagtagagatagggttttattatgttggttaggttggtttcgaatttttggttttaagtaatttttttgttttagttttttaaagtgttcggattataggtatttggtttaaatattatttagtttgaagattttttaatgttttttgttttttttttattttagttttttgtaatattttatttagattttaataattaatttagatatagagttttatgattattgatttatatgttagttttagggttttattgttttttttatatttttgatgagagtgggggtttattaagagtagaagttgtagtttatttgtttgaaagttattagtatttaaaattagttaataaatgttaattggaatatgtagtgttaatgtatagagttttttatttgtaaaggttttagaaattagtaagtttaatttttaattttattatttgttgatttatttttgagataaagtgttatttttttgtttagattgtagtgtaatgatttaattttaatttattggaattttaaatttttgggtttaagtgattttttaattttagttttttgggtagttggtattattgagtttaggtgattttttatttgttttagagatgggggtattgttatgttgttcggattggttttaaatttttggttttaagtgattttttttttttggttttttaaagtgttgggattataggtatgagttgttatatttggttaaatttttgattttagatgagtaaattgaggtttatagaggtatgtttaaagttatataatttatttggagtagagtaaagttggagttgttggtcgggcgtggtggtttatatttgtaatcgcggtattttgggagattgaggtagtaagattatttaaatttagaagttttagattagtttgggtaatatagtgagattttatttttagaaaaaaaattaaaaaattagttaggtgtgatggggtatgtttgtagttttagttatttgggaggttgaggtaaaaagattatttgagtttaggagtttaaggttgtaatgagttacgattgtgttattgtattttagtttggataatagagcgagagtttgttttaaaaaaaaaaaaaaaaaggttaggcgcggtggtttatatttgtaattttagtattttgggaggttaaggcgggtgggttataagattaagggatcgagattattttggttaatatggtgtaattttgtttttattaaaaatttaaaaattaatcgggtttggtggtaggtgtttgtaattttagttatttaggaggttgaggtaggagaatcgtttaaatttaggaggtagaggttgtagtgagtcggaattgcgttattgtattttagtttggtaatagagtgagatttcgttcgttttaaaaaaaaaaaaaaaaaaaaaaaaaagttcgggtacgatggtttatttttgtaattttagtattttgggaggttgaggcgggtggattacgaggttaggtgtttaagattagtttgattaatatggtgaaatttcgtgtttattaaaaatataaaaattagttaggtatggtggtatacgtttgtaattttagttatttaggaggttgaggtaggagaattatttgaattcgggaggtagaggttgtagtgagtcgagattaagttattgtattttagtttggatgatagagcgagattttattttaaaagagtaggttgggtacggtggtttatgtttgtaattttagtattttgggaggttaaggtgggtggattatttggggttagaagtttaagataattagtttggttaataatggtgaaattttgtttttattaaaaatataaaaaaaaaaaaaaaaaaaaagttagttgggtatggtggttggagaattgtttgaatttaagaggtggaggttgtagtgagtttagattttgttattgttatcgtattgtttattttaatttgggtgatagagattttgtttaaaaagaaaaaataaaagagagatagagagagagaatttatgttgggtttaagtggaagtagggagtagtggaagttttttattagtaaaatttagaagattgtttttatagttagagatttaagtttaaatagtaattttgatatttattgtgtgattttgttgaaattattttttttaagttttatttttttttttttgttaaatggggttttttatttattttttataagtttatatgaatgttagtttagtttagtgtttagaaatatttttattagtgtataattttgttttattaatttttgttttggaaggtggaagaatgggattgggtaattaattttttttgttttagatttttgttttttttttttttttttttttaatagagtttcggttgggcgcggtggtttatgtttgtaattttagtattttgggaggttgaggagggtaaattatatggttaggagttcgagataagtttggttaatatggtgaaattttgtttttattaaaaatataaaaattagttgggcgtggtggtgcgcgtttgtaattttagttttttgggaggttgaggtaggagaattgtttgaattatggaggtggaggttgtagtgagttgagattacgttattgtattttagtttaggtgatagagtaagatattattttaaaagaaaaaaaaatagatagaattttattttgttatttaggttggagtttagtggtgtgaatttggtttattggaatttttattttttaggtttaagtgatttttttg

SEQ ID NO: 419 - DNA, 5062 bp, Artificial Sequence
  chemically treated genomic DNA (Homo sapiens)
atttagtcgttatttggaggaggttaaaatttaggttgtttcgtggtagttagtagtttaggtttgttcggaaattttttgttttagttgtagttttcgtttatttttttgttttttttttcggtttttttttggtattgttttttagttggttggttttttatttgtttagttatttatttatattttttattttatttgagggtgttttaaagaagagttcgtaatagttcgggggtttatagttagttattcgcgggatttcgtatatgtacgtggatttataggaagattttttttgttttttttatagaatttagttggtgtagaaattgggttttgtagtaacgaaaggtcgatttgtgtagttgttgttatttcgaatttttagtttagatgttggttgtggtatggggattaggggttgtgatttttatagttttggtaggtattacgggggatgttttttttattttgtgtttttattttaggttagttttttttttaagtcgacgttcgtagtgttaattttaaaggattgtgtagttagtttgtggcgttttatgggatttaggaagtttaatcgagttttgtacggtatttacgaggtatttaggtatttcggtgttgggtagggggtatatatgtgatatagatttttgagtgtgggttttatatatttggtttggtatagttgtaagttagtttagttattttgttcgttgtggtattggggttaagtgatggaaggtttaggtatcgttatttttacgtttggtatattggtttaggttagtttggtaagttagtttttttaggggttaagaataggtgaggaggatggtgaggaagtagttggggttgttaattgagggaggaggttatatttggggatgttggttattatttaagagtattgggttatttagtagaaggtggttgtaatagtaatgagacgagggttttcgattttagagttgtagtagttagttttggtgtagagtgatttttgggttttttttttatgtttttttttttttttttttgagagagtgttttgtaatagttgatttatgttgatttcgtaattaagtttgttcggtttagtattttgtttagtcggagagggggatagaagcgataagttgttatttttttttttttatttattcggtgtttaagttgatatcggagggattcgagcgaggggtttcggggattaaaaggtcgttagcgggaggtgggagggagtcgtggggatgtgggagggggttaggtcggcgttttggggtgtttgtttaagtgagcgtcgaggaatttagttgaaggtaggggtgtttgaagaggaagtgggggtggttcgttgtaggtgttttttcggggttaaaggtgaagtttcgggcgatttatttttttttaggcggttttttttcggtagttggttttggttttaagtttggagtagttttttaaattgggaaatagttttttgagtgagggaggggaggagtttcggtgggtcgagttagttaaaggggaagtcggttttttttgggattggtttggttggatagtttttggttagagatcgaggttttgggagaaagaggggtgtgtgtattaagttttgggtgatagtgggttgggtagggaggaagtaggggtagttttattaggaaacggtaaaggggaggaagtagtttagtttttttttttagttggttttggagtttgggttgagattgtaggtggtgggagttttagggtgtttagttttggggtgtagtagatgggttggtgtggatggtatagggtggtagaacgtagtatttagttattttaaagttgtcgttatttgaagtggggttttagcgttgtgtgaagttagtaaagggagtggttttgttgggtgtttggtttggtagtttaggacgtttagaaagtggtagtttgggagtgatgtggttagagttatttttttttgggtatgtggagatttacgaaggttgattttttttgtttaggagtttattttatggttgggttaggttattttgtggtttgtttttagggatgtttttcgtttttcgttatatatatatatatatatatatatatatataggtttatttttagtgagtattttttatatatatatatagaatataggtttatttttagtgagtttcggggtttatagattttagatgttttaatgttttagttgatcgttggtttggagtttgatgttttgggaaaattttggggttttggagggatatttatgtatatttttttttttttttttttttgagacggagttttatttttttgtttaggttggagtgtagtggcgcgattttagtttattgtaagttttgttttttaggtttacgtcgtttttttgttttagtttttcgagtagttgggattataggcgtttattacgacgttcggttatttttttgtatttttagtagagacggggttttatcgtgttagttaggatggtttcgattttttgatttcgtaatttatttatttcggttttttaaagtgttgggattataggtgtgagttatcgcgcggtttatttatgtatatttttttagttatttatgtattagtggaaattaagttttaggttttgtttaaagagtgatttttaggagttgagagtttatggagtagaggttatgattgtcggggagtttcggtcgttgggttttgtagttaggtggggttgtttgtgtttaggtacgggagtttttattttagttaaaggagacggagtttttaaattttttttttttttttggtttttagtgtgaatgggtggtttaggtattttcgtaggttgcggagtcgtgattatttgtgttttttgcgtgaggtgggtttattagtttttgggagtagagggtgtatgataggttttagttttgtttagttttgagggttggaggagggcgggggtagtttttttttagtttagtttttgggatttttgtatggttttttttagtttaggtttagaggttaggttaggagtttggaacgtattggttgtgtttagggttgttttttttttatttttcggcgtatttttgataggaggcgatggtttgtatttgtgttgagtttaggttttttgcggagggtaaaatttgtcgaggaggtattttttcgtgtgatttttttaggaagttattattgttattgtgtttagtagtaggggtgggggcgatgggggtgggagaagttggtgttagggtagtgtttttgtattttgatttgtatttaaggttggggggtttttttatgtttggttgagggtttgttttttggggtagtgttgtgtcggacgtgtaggaaagggtttttgtgggttttttgatttttagtttaggttttttttattttttatttggaagaatttagtggttggagtttcgggattttgtttttgagttggtttggttgtggggaggggtttttggttttttttttttgttttgtgtttgtagttttattttttggttttaggttgggtgaggtggagttttgagtttggtgaggatgtgtgtattcgtttggttatattttagtttttttgatgagagtaagaagttttttagtttataattttttgaagtgattttagtttttttggaggagttttttatttgtttgtattaaatttggaaagtgggggatggagtatgaggcgggggtttatgtttaagggtttggtgggagttgggttgagttgggaattttagaaatatttttagtaagaaagtgagagtagagtgttggagggatttcgagtggggaagagttggttgttaagttcggttattttagtatttttgtttttgttttttggttttgtgcgatttattcggggtagggattagagagtaggttgtagttcggaggggttgatttcgttagtttttacgttgggtaggttcggggtggtttattgtgggagtttttgtgaaatattttggatggggtggggtaggggttgttttttgtaatttaaagttataggatggttattttattagtggaggaggtcgattgggaggtttagaggggtttcgggttaggttttttttagttgatggtttgttatttggaaggtgggggaattttttggttagttttgttaatagattagagttagatggacggtttatttttagttttttaaagttaggaggttgggagattcggggttttttgtagttttttttttggttaggtttttcgtggggtttttgtgtatttagggagtagggggttttgttcgaggtcggtttaggggaggtggttgtagaaggtaggattttggaagatgtatatatagggttattggttggtttttatttgttattggttaggttgggggttgcggttttcgtggggcgttgttggttggcgggttagggagtgcgggcgcggcggggaggtagaggtaatgtgttgagttagcgtgattcgttaggaatagtcgcgttttgggtagtgtcggggttatttttaaagttttcggtttttttttaggtttgtttttttcgcgttttattttttttaattttttttttgttttttgttttgcgtttgtttttttaatagtttttagttttttttttttcgttagatttttttgattttttatttggttttttaggggtagggtggataggaagtagtttagtttagtttgggagaggttaagggttgttttttattaggtattgggggttgggtatttggatagtaggttggggcgggttgtgcggtaagggtttttgtgaattgggtcgggggcgggggggggggggtgcggcgagggtggtttttagggtattgatttgtttcgtgttttgtagagagcgtttgttcgttgtgttttcgggttatgacgatttttaataaaggaaataaggttttgaaggtgagtgggtagggataggagtttgtgggttggggtcggggggtatagtgggcgtgttcgtttggtttgtgattatttgtattgtgttttagg

SEQ ID NO: 420 - DNA, 5062 bp, Artificial Sequence
  chemically treated genomic DNA (Homo sapiens)
tttggggtatagtgtaggtggttataggttaagcgggtacgtttattgtgtttttcgattttagtttataggtttttgtttttgtttatttatttttaaggttttgttttttttattgggggtcgttataattcgggggtatagcgagtaggcgttttttgtaagatacggagtaggttagtattttggagattattttcgtcgtattttttttttttcgttttcggtttagtttataagagtttttgtcgtatagttcgttttagtttgttgtttaggtgtttagtttttaatatttgataggaggtagtttttggttttttttaggttgggttgagttgttttttgtttattttgtttttagagaattaggtgggaggttaggaaggtttgacgggagaaggggaattgaaggttgttaggaaggtaggcgtaagataaggggtaggggagagattagaaggaataagacgcgggagaggtaggtttagaaggaagtcgggagttttaaaaataatttcggtattgtttagagcgcggttgtttttggcgagttacgttgatttagtatattgtttttgttttttcgtcgcgttcgtattttttggttcgttagttaatagcgttttacgagagtcgtagtttttagtttggttaatagtaggtgagggttagttagtgattttgtgtgtgtattttttagggttttattttttatagttattttttttgagtcggtttcggataaagttttttgttttttgggtgtataggggttttacgggggatttggttagagaggaggttatagggaatttcgagttttttagttttttaattttgaaaagttgggggtgggtcgtttatttagttttggtttgttggtaggattgattagggagtttttttattttttaggtggtaggttattagttgggaggagtttggttcgaggtttttttagattttttagtcggttttttttattgatggagtaattattttgtggttttgggttgtaggaagtagtttttgttttattttatttagggtattttataagggtttttatagtgagttatttcgggtttgtttaacgtgaaggttggcggagttagttttttcgagttgtagtttgttttttggtttttgtttcgggtgagtcgtatagggttagggagtaaaaataaaagtgttggggtggtcggatttaataattaatttttttttattcggggtttttttagtattttgtttttatttttttgttaaggatgtttttgggatttttagtttagtttagtttttattagatttttgggtatggattttcgttttatgttttattttttattttttaggtttgatgtagatagatgggagatttttttagaggagttaggattattttaggaaattatgggttggggggttttttatttttattaggggagttgaagtgtggttaggcggatgtatatatttttattaggtttaagattttattttatttagtttgggattaggaggtgaggttgtaagtatagagtagggaggggaggttagagatttttttttatagttaagttagtttagaggtaaggtttcgaggttttagttattggatttttttagataaaggatggggaagatttgagttggaggttagaaggtttataggagtttttttttatacgttcggtataatattgttttaggagataggtttttagttaagtatggaggggttttttagttttgagtgtaagttagggtgtagagatattgttttggtattagttttttttatttttatcgtttttatttttgttgttaagtataatgatagtggtgattttttgaagagattatacggaaaagtgttttttcgatagattttgtttttcgtagaaggtttgaatttagtataagtgtaagttatcgttttttattaaaggtgcgtcggggggtgggggaggggtagttttgagtatagttagtgcgttttaggtttttggtttggtttttggatttgggttgagagggattatgtagggattttaggagttggattgaggagaagttgttttcgtttttttttagtttttaaggttgggtagagttggggtttgttatgtattttttgtttttagaggttaataagtttattttacgtaggaggtatagatggttacggtttcgtaatttgcgagggtatttaggttatttatttatattgagagttaggaaagggagggagatttgggagtttcgttttttttggttaaagtagaaattttcgtgtttgaatatagatagttttatttggttgtaaagtttagcggtcgaaatttttcggtagttatggtttttgttttataagtttttagtttttgaaagttattttttgaatagaatttaaaatttagtttttattgatgtataagtgattgagaagatgtatataaatgggtcgcgcggtggtttatatttgtaattttaatattttgggaggtcgaggtgggtggattacgaggttaggagatcgagattattttggttaatacggtgaaatttcgtttttattaaaaatataaaaaaatagtcgggcgtcgtggtgggcgtttgtagttttagttattcgggaggttgaggtaggagaacggcgtgaatttgggaggtagagtttgtagtgagttgagatcgcgttattgtattttagtttgggtaaaagagtgagatttcgttttaaaaaaaaaaaaaaaaaaagatgtatataaatgtttttttaggattttaaaatttttttagggtattaaattttaggttaacggttagttaaaatattgaaatatttggaatttataagtttcggggtttattgagagtggatttgtgttttgtgtgtatgtgtggggggtgtttattgagaatggatttgtgtgtgtgtgtgtgtgtgtgtgtgtgtgtggcggggggcggggggtatttttgagggtaaattataaagtagtttaatttagttatgaaatgaatttttgggtaaaggaagttaattttcgtgaatttttatatatttaaggaaaggtggttttggttatattatttttaagttgttattttttaagcgttttgggttgttaggttagatatttaatagggttattttttttgttaattttatataacgttgagattttattttaggtagcgataattttagggtggttgggtgttgcgttttgttattttgtgttatttatattagtttatttgttgtattttaaggttaggtattttgaagtttttattatttatagttttaatttagattttagggttaattggggagagaggttgggttgtttttttttttttgtcgttttttggtagagttgtttttgttttttttttgtttagtttattgttatttagggtttggtatatatattttttttttttttaggatttcgatttttggttaggggttgtttaattaggttagttttagggaaagtcgattttttttttggttagttcggtttatcgaagtttttttttttttttatttagggaattattttttagtttggaaaattgttttagatttgggattaggattagttgtcggaaaagagtcgtttgggaaggggtggatcgttcggggttttatttttgatttcgggagaatatttgtagcgagttatttttattttttttttaagtatttttgtttttaattggatttttcggcgtttatttaaataggtattttaaggcgtcggtttggtttttttttatatttttacggtttttttttatttttcgttggcggttttttagttttcgaggtttttcgttcgaattttttcggtattagtttgagtatcgagtgaataaaaaaaaaaaaatagtagtttgtcgtttttattttttttttcggttgagtagaatgttgaatcgagtagatttgattacgagattagtatgagttagttgttatagagtatttttttaaaaaaaaaaaaaaagaggtatagaggagagatttagagattattttgtattaaggttggttgttgtagttttgaggtcgagagttttcgttttattgttgttgtagttattttttgttaggtgatttaatgtttttgggtggtgattagtatttttagatgtgatttttttttttagttgatagttttagttgtttttttattattttttttatttatttttagtttttgggaaagttggtttgttaggttgatttgagttaatgtgttaagcgtgagggtggcggtgtttggattttttattatttggttttagtgttatagcgagtaaagtggttgggttggtttgtagttgtgttaggttaagtgtgtggggtttatatttaggggtttgtgttatatgtgtgttttttgtttagtatcggggtgtttaggtgtttcgtgggtgtcgtgtaaggttcggttgggttttttggattttatgggacgttataggttggttgtatagttttttgaggttagtattgcgggcgtcgatttggaggaggagttggtttagggtgggggtatagggtggggaggatatttttcgtggtgtttgttagggttgtgggagttatagtttttggtttttatgttatagttagtatttgagttgggagttcggggtggtaatagttatataaatcggtttttcgttgttatagagtttagtttttgtattaattgaattttgtgggagaagtagggagggtttttttgtgggtttacgtgtatgtgcggggtttcgcgagtggttggttatgagttttcgggttgttacgggtttttttttggggtatttttaaatggaataagaggtgtggatggatggttgggtagatggagggttagttagttggaaggtagtgttagggggaagtcggggagaggggtaaggagatgggcgaaggttgtagttggagtagagggttttcgggtaggtttggattgttggttgttacgggatagtttggattttagttttttttaggtagcggttgggt

SEQ ID NO: 421 - DNA, 11694 bp, Artificial Sequence
  chemically treated genomic DNA (Homo sapiens)
gtggtatgatttcggtttattgtaagtttcgttttttgggtttatgttatttttttgttttagttttttgagtagttgggattataggtgtttattattacgttcggttaattttttgtatttttagtagaggggttttattttgttagttaggatggtttttattttttgatttcgtgatttatttgtttcggtttttttaagtgttgggattataggcgtgagttttcgtatttaatttttagtttgttttttaagttgtaagtggttttgatatggagatagaaaataaaatattatgaatgataaataatttaaaatttgaattaaataaagtaggtgtatttttattttgttattttttattaaaagttattgtagtatattttttattgagtattagtattatattttgagtgtttgtaagatttagaatttattgtaaaattattgtttttggattgaggttatattttagttttattagtggattttttattaatcgattggaattagttaattttaatatagtttttttttatagttgaatatagaataaaatttattgtaagttgggtgtaggggtataagtgtggtaggagtgtttgagtttaggagtttaagattagtttgggtaatatagtgagattttattttaattgaaaatatatatttatataaaaaataaaatttattatagtttattttgttggaaaataaaatattgtttttgtaattaaaattttttttttaaatttagaaatggggttttgttgtgttgattaggttggttttgaatttttggttttaagttgtttttttatttgggttttttaaagtgttgggattataggtgtgaataattgcgttcggttgataaagtattttttaaagatgtattattaaatggagatttgatttatatttgatagtttttgataggttttttttatttaaaaatattattgtttttgtagtattattttggttttttttttaatttagtaaatatttgagtgtttttgtattttagatattgagtaagattggtagggttttgtttttatggagtagaaggaaggtagggggattgattaaaatttgaaaattgtttaatataagtattatgtagaaaatgaaatagtattaattggtagaaggagagtaggttattttggttagtgtggttagggaaagtttttttaaagagatgttttttgggtggagataagatgtgaaaaaattagtttgtttgtttttggggttttagttttgtaggtgaagagaaatacgaagtttagaagttttgaggtataaagtttggtatgttacgaaagaaggtttttagacgttttgttagggagtttagattttattttgagttttaaaacgggagtgatataatgagttgtattttaagtttgtttaggttgttatatggattattaggagttgtattattttaggttagtgagatgtttagatgagtttgttttttgtttttttcgttatttattttttttttatttggttttaagtttttttatttttttttttttagttggaaaaaaatttaaagatttagaaaaaagaggagttgtatgtatttttaaaaagggattttatagtaatttggggatagagttatgtaggagtgagttagggtttaggttgaggttttagaggtaggaggtagcgagattttgttttgttatttttttttatagaaataaaatatgtcgataaaagtttatagtgtaatagtaaaatataaaaataaaaagtaagtaatgtagaaaataaaaattttttatagttttgttgaaatgattattgttaatattttaattttagagttttttatttatttatttatttttagatttttttttttgtagattaatattaaagggtttagatttgtttattttttgttgttttggatatttttttttatttttgtatatatggatttattttatttattacgtggatattaatatggtttatttaattttttattgttaggtatttggtttttattatagttttttaagggtatgaatagtgttgtaaggaatatgtttatatatgtttttatatatttgttttaggtttttgtaggataaatttttggagtagaatattaggttattttttaagaatattttaaatttttaatagatattatcgtatttttttttaaaaagaatgtataaagattgtatgagaataattttatgttgtgattttaagttgtttttaaatttttttggtttttttagttgttatttaagaatattaagtatttaattttttttttgatttgggtatgtgatgtgatttagtatatagtggatatttagttagaaatttttggttgaaaataaggtttggattttgtggtttttaattttaggttattttagttttgattaaaatgatttgagtgttagtgttatatatgggaaggtaagggttatggagttagtgtagtttagtttagaattttagtttgttatttataagttgtgtgtgtgagaatttttttaattgtaaaatggggatataatttttatttagagtaatattgtaagtattaaggtggataatgattggaatgtatgttgtgtattttgttttataatagtaagtttttagtaaatggtagttattgttaataataaaataagtttttgaaggaggaaggtttgaaaagatgggattttttattaattttaaagttttttaaaggaggaaattttattttttttatttttgtatggtttttgattatgaattgaattttgaattttgaatgaattgaattttgaattttgaatgaattgaattttgaattttgaatgttatggtagaaaatttatggattttaaatttaaatagataaagaatttggttattttatttattgttggggtgtttttgggtaagtagtatgatttttgtgtttaaaaaagaaagggtttgtagtgattgaatttgtaattttagtattttgggaggttaaggagagtggattgtttgagtttaggagtttaagattagtttgggtaatatagtgagagttttttttaataaaaaaaattgtttttaaaaattagttgggtatggtgatgtacgtttgtggttttagttatgtgggaagttgaggtaggagaattatttgagtttggaaaattgaagttgtagtgagttgtgattatgttattgtattttagtttgggtaatagagtaagattttgttttagaaaataaattaattaaaaagaaagtgtggatggaggaagggattaaaaatttggttgggtacggtggtttatgtttgtaattttaggcgtgatttgggaggtcgaggcggatagattacgaggttaagagattgagattattttggttaatatggttaattttatttttattaaaaatataaaaattagtcgggcgtggtggtgtatgtttgtaatttcggttattcgggaggttgaggtaggagaatcgtttgaatttgggaggtttagtgagttaagatcgcgttattatattttagtttggtaatagagtgagattttgttttaaaagaaaagaaaagaaaagaaaatttttggggtttttatataaattaaatgagataatttattattattattttttttgagatggagttttgttttgttttttaggttggagtgtagtggtgcgattttagtttatcgtaagttttgtttttcgggtttacgttatttttttgttttagttttttgagtagttgggattataggcgttcgttattatgtttggttaattttttgtatttttagtagagatagggtatttttgtgttagttaggatggtttcgattttttgattttgtgattcgtttatttcggttttttaaagtgttgggattataggtatgagttattatgttcggtttgagataatttataaagtgtttaaaatatattttagaaatattagttttttttttttgaagttataaattatggtttatatttttttttaggtattttttatagtattaatgtgttgtttatatttaagggtagtagttgtttaggaagaagagaaatgtagttgaaaaagtaatagattagaagttttgagatttgggtttatgttttaagttggtttttttttttttttttgggagatggagtttcgtttttgttttttagtttggagtgtaatgatacgatatcgatttattgtaatttttattttttgggtttaagtgattttttttgttttagtttttttagtagttgggatgatagatatttattattatgtttggttaatttttgtattttaagtagtgatagtattttattatgttagttaggttggttttgaatttttggttttaagtgatgcgttggtttcggttttttaaagtgttgggattataggtatgagttattgtgtttggttttttgttaaatgttttgttttgttttgttttgtttttgaggtggagttttgttttgttatttaggttggagtgcggtggtatgattttcgtttattgtaagtttcgttttttaggttttcgttatttttttgttttagtttttcgagtagttgggattataggcgttcgttattacgttcggttaattttttgtatttttagtagagatggggttttatcgtgttagttaggatggtttttattttttgatttcgtgatgtatttatttcggttttttaaagtgttgggattataggcgtgagttatcgtgtttcgtagttgtttgttaaattttttaattgttggttttattttttttatttatgaaatatttaatggaagtgtattattaaagaaatttttttttgttgatgaatgtaggaggtattattaaaaatttatatagtgttatttttataattattttttatgtattgtgtttttgggttgaatatttttgttttagagttataattatttgtgttttttattaggtttaagaattgtttaagttgtattaatggagtatatatagggagtttggaagacgattagtaatggttttggatttaaagatgtcgtgtttgatggttttagttgtattttttttataatagtttagtagtttggttattagcgtcgggtattagatgatggtaaatttatagatttttttaagataagtaatattattcgtgtttttttgtcgaataagtaaagaatagtggtatgtgaatattttatttaggaaatttagttatttatttgtttgtggagtatattaaggattatgtttaatttaaagataggtaaaatatttattgttatttagggtttttatttttttttttttaattgtagatttatttttttatattgttgttttttttatattttttatttttttttattttttggttttttttttgttatttttgtttggaatgtttttttttgtgttattttatttaaataaatagtatatttttatgggtatattttaaagatttttttttgagaagtttttaggtttttttaattatttattttagaagatattttattttttttattaaaatatttatttaaagttttttgattattataattaagtataaagaagaaagtaaagttatatagaaaagattatttttgtatattttataggtttaggattagtttggaggtagtttagaaattatagaatttttttttttagggtattgatattagttatttagttttgcgtagtttatttttttagtgttagtgataggtttatattggtattatggtaggatattgttattaggttttttgatagaaaatttttttttttttttttttttttttttttttttttgagacggatttttattttgttatttaggttggagtgtagtttattgtaatttttgttttttgggttgaagtgatttttttgttttagttttttaaatagttgggattataggtatatatcgttacgtttggttgatttttgttttttgtatttttagtagagacggggttttattatgttaattaggttggttttaaatttttgattttaggtaatttatttgtttcggttttttaaattgttgggattattaatatgagatattacgtttagtttgataataaaattttaatttttttaagaatttagtttttaaaaagttttttggttgggtgtggtgatttatatttgtaattttagtattttgggagatcgaggtgggtagattgtttgagtttaggagttcgagattagtcgggtaacgtggtaaattttatttttataaaaaaaaatttaaaaaagtaggtttggtgtagtggtttacgtttgtaattttagtattttgggaggttgaggttagtttattatttgaggttaggagttcgagataagtttggttaatatggtgaaattttatttttattaaaattgtaaaaattatagttaggtatggtgttgtacgtttgtaattttagttatttgggaggttgaggtaggagaattattcgaattcgggaggtagaggttgtagtgggttaggattgcgttattgtattttagtttgggcgaaagggtgagattatattaaaaaaagaaataataataaaaatgtagtcgggcgtggtggtatacgtttgtagttttagttattcggtattcgggaggttgaggtgggaggatggtttgagtttaggaggtaaaggttgtagtgagttgagattgtattattttattttagtttgggtgatagagagttagatttttttttaaagaaaagaaaaataaaaaaagttttttattattatggataaaataaataaaattaattatttggttaaaatagaaaagtgaaattgtattggttttgtttggtggaatttttgagaaaatttgggtttaaaatttttatgttttttttttttttattttttgttttttgtgtaaaattaatgtattgtgtttattttatatagttaggtgaagtaaggttttgaggtggggaattttagtttagagttttttgtttgtttttaatagttttattttttttaatttgttaataaattgtttatattttttttgtgaatttaaggagttttttaagtgtagtgttgaatatttaggtgtattttgaattgaaggtaaaatttaaaagtttaattttaattaaagtttgagtaagtttatttttgtttttttttttaaaaatgaaaattttatggttggtaaaataagtagtaataattttttatatttgaataatggttttttatttgtaaagtaattttgtttattgttttttattaattttttttgtgattttaaattgagaagttagataggaagtgtgtgttatgagaagttgaagattatttggtgtttttttaaagtgttattgagattattttttttatttttatttgttattagtttgtttagaaggttgggaaatttaatttggtatagtgattaagtgtatgaatttttaaaataagaaaattttaatttaaatttttattgttttttattagttgtattatttagataagttttgtatttttttgatttttttttttgatttttatgaaatgaggtttgtatttagtatagtggttgatttataagtgaagtggtagttattattattattattatatgtattttttttagatggaggtttttattgttatttaggttggagtgtagtggtttaatttcggtttattgtaatttttattttttaggtttaagcgattttttttgttttagttttttaagtagttgggattgtaggtattcgttattacgtttggttaatttgtttgtatttttagtagagatagggtttattatgttggtaaggttggttttaaatttttgattttttgattcgtttgtttcgtttttttaaagtgttgggattatagatatgagttattgtattcggttgttatgattattttttagttttttatatatttatgtagtttttgattttttttatttgagtatagttggtggttggaagttaagtttgattttttttatagtttatgagaaggttgtagtttaggttagttttgtttgtttttttgggtaaagatgaattaattgtggaagaattagttgtttttattaggtacgtagtttgaggaaagcggtagaagagggaagagttgtttagttaggttagtattattagttagttttttttatttttttttaggttgttttattttttgaatttagaatgatttttataattatttagtgggttttagaaattatttaattgattttagtatgtatttatggagggttgtaaagaggagaatgagatagaggacgcgtatttgatttaaataattttagatgtgataattaggtttttgaatgttttttggaatttttattttttaaatgtgtgtttttttgatttttttttgttgttgttgttgttattgttgttgttgttattgtttttaattattattagataagtgattgattggagtcgaggattattattattagagttagttgattagtaggttaaaatatagatttattttgtatgaatgggttttattttatattaattgaattagaatttttggatgtgttggataggtagatggaatttatatttttttaagtttttttgaggattttaatgttagttatatttgggaatttgattggattagatgatatttaaagaattgtttagtttgtagtatgatttagtgaagattgataatgtaatagatattattttatagtttagaaaatattgttatatagtatttgatgtaggttatgatttcgttaggtatgtttattattttttgttttttttatttttagtgttttagtagtttatattagtatagtttatttgttttgtttttgaaaagttggaagttggtgggtattattgcgttaagaaatttttaaaataaatttattttggaatattaaaaaatatatataggttgggtgtagaggtttttttttgtaattttagtattttgggaggttgaggtggaaggattgtttgagtttaggagtttgagattagtttgggtaatatagtgagattttgtttttataaaaaaaaaaaatattagttagaagtggtgttgtttatttgtggttttagtcgaggttgaggtagggggattatttaaattggggtggtaaagggtatatgtgttatgattatgttattgtattttagtttagatgatagagtaagattttgttttagtatatataatatagattttatatatatatatatacgtacgtacgtagagaaaataataaatttgatgtattttttatttatttttaatatttagttaattatggtaggtttgtttaatttgtttttatttattttttttttagtgttttgatataaattttaggtattatttgtttgaattattttggtatgtataagaaatttttaaagaatgttaattttatttatttttaaataggtaaagtatttatatgagttaaaagttttgggtgatttttgtttttgtatttttattttttttttttagaggttttttatgattaatttttatttattcgaagaattagttggtttttttttattttgttgtttacgatttttttttttttttatatttttgaaggagaggaaaaattatcggtagttaaggaggttattataaattttaaaggaatttttttcgtttggagaatttttttttttttttagatgattgatttttttggagaatattttttttttatttttattattttttcgattaatttgttataagtttaaatttttttatattgtatttttaatgtggagtttatttttgggttttaaagaatgattattgggtagataagttttttttagtttttggtgatagtaaaataaagttttgtgaaaaattttttacgttgtttttttttgatgtttttaaattttttatgtttatatgtattttttttttttttagattgttttttttgttttgtatttatatattatgttttagtttggagtttggtaattagaagggtttagataattatgtttttttttttaagatttttttttgttgtaaattagttagagaaggttggttggattggtattgaggtggttggagtaagagttaagattaagaatattttgggttttttgtagttttgttttattttttttttttttttcgtgtatttatataggtagatatatgtatatatttattattttttgggggcggggtgtggggggggatggcggggtgggggagcggttggttggttgttgttagttgttagtatttttaattagaggaggaatttggtaggtagtttataagtattgtaaatttttgttttgttttttttgttggttatattgattttagttattttatttttgattaatttttggttttgaagttaaatatggagggtttttattaaaattttgaaatttttatttaaatttttttatagttgttattaattgtgagtattttgggtatttatattttttagtagggttttgagtatttgtttagttttttgaggattgagtataggggaatatagagaagtatgtgttattaaggttgtttggtatggtgtgtatatatatttaaattaagattggtgtttgtttttatagtagggttggagttttatattttttattttttgttttgtttttattagtgttaagtatttgtgagatggaatttttgttagaattattagttatttttgttgaaagaggttgaagtataaattttgattataaaaattcgtttgtttatagattagattggtttattttttttttaatgaatttagtgaatatatatgtgtatatattttaattatataaaattagagacgtataaaggaaaagtttattattttattttttttaattattttttaattatttttttaattgttttttgatgtgaatagttaggtgtaaatttttttatttgtataatatatatagatttttttattttttttttttttttttttgagacggagtttcgtttttgttatttaggttggagtgtaatggtgcgattttagtttattgtaattttttttttttgggttttagtaatttttttattttagttttttaagtagttgagattataggcgtttattattatgttcggttaatttttgtatttttagtagagacggggttttattatgttggttaggttggtttcgtatttttgattttaggtgatttattcgtttcggttttttaaagtgttgagattataggcgtgagttatcgtgtttggtttttttatttttaaaataattttattttattattttgaaggatatttttttttaattaatatattatggatttttttttatttaggttattataagtaatataatagttgtataatgtgatataatatagatgttttatattttatttaagtatttttttattgttggatatttaggttgtttcgtatatgtgtgtgtgcgtgggttattataagtaatatagattggtgtatttatttttgtgtttatttttttaaggggtgttgtagtttgtgttggttttaaaggtggttttttgtttgtagg

SEQ ID NO: 422 - DNA, 11694 bp, Artificial Sequence
  chemically treated genomic DNA (Homo sapiens)
tttataaataaaggattatttttaggattaatataggttgtagtattttttggaaaggtgggtatagaaataaatgtattagtttgtattgtttgtgatggtttacgtatatatatatatacgaaataatttgaatgtttagtaataggaaagtatttgaatggagtgtgagatatttgtattatgttatattatgtagttattatattatttataatgatttggatggagaggagtttatgatatattaattgggggaaaatattttttagaataatagagtaagattattttaaaggtgaagaggttaggtacggtggtttacgtttgtaattttagtattttgggaagtcgaggcgggtggattatttgaggttaggagtacgagattagtttggttaatatggtgaaatttcgtttttattaaaaatataaaaattagtcgggtatggtggtggacgtttgtaattttagttatttgggaggttgaggtaggagaattgttggaatttaggagggagaggttgtagtgagttgagatcgtattattgtattttagtttgggtgataagaacgagatttcgttttaaaaaaaaaaaaaaaaaaagtgaagaaatttgtatatgttatataagtggaaagatttatatttagttgtttatattaagagatagttaagaaagtggttagaaagtggttaagaaagataaaatgataaattttttttttatacgtttttaattttgtgtgattagaatgtatatatatatatgtttattagatttattagagaggaaataagttaatttgatttataaataaacgagtttttatgattaaaatttgtattttaattttttttaataaaaatgattgatgattttaataaaaattttattttataagtatttaatattagtgaaggtaaagtaggaagtggaagatatagaattttagttttgttgtagggataaatattaattttagtttaaatatatgtgtatattatattaagtagttttagtggtatatatttttttatatttttttgtatttaatttttaaaaagttaggtaggtatttagaattttattgggaagtgtgagtgtttaggatatttataattaatggtagttgtaaaaaaatttgaatgaaaattttagagttttgataaaagttttttatgtttaattttaaagttaagaattaattaaaagtaaggtaattagagttagtatggttagtaaggagggtaaaatagagatttgtagtgtttgtgaattgtttattaggttttttttttgattgaaagtgttaatagttgatagtagttagttaatcgtttttttatttcgttatttttttttatatttcgtttttagaaggtggtgagtgtatgtatatatttatttatgtgggtatacggggagggggaaggaagtaaagtagggttgtaaaaggtttaaagtgtttttaattttggtttttattttagttattttaatgttaatttagttaattttttttagttggtttataatagaaaaaagttttaagaaagaggatatagttatttgggtttttttagttattaggttttaaattagggtatagtatgtggatgtaaagtagagaaaataatttaggaaagaagggaatgtatgtaagtataaggaatttgaaaatattagagaggggtaacgtaagaagttttttataaggttttattttgttattattagggattgaaggggatttatttgtttagtaattattttttgaagtttaaagatggattttatattgagagtatagtatagaagaatttgaatttgtaatagattagtcgagaaggtgatgggagtggggaaggaatattttttaggaggattaattatttgggagaaggaaaagattttttaaacgaaaaaagtttttttggagtttgtgatagtttttttagttatcgatggtttttttttttttttagagatgtggaagaaaggaaaggtcgtgaataatagggtaaggggaaattaattgatttttcgaatagataaagattgattataagaaatttttgaggaaaagaaatggggatataggggtaggggttatttaagatttttggtttatatgaatgttttatttatttaaaaataaataaaattagtattttttaaaagttttttgtatatattaaaatagtttagataaatgatatttgggatttgtgttaaaatattgggaaaggagtggatgaaaatagattaagtaggtttgttatggttagttaagtgttgaaagtgggtaaggggtatattagatttgttattttttttacgtgcgtgcgtgtgtgtgtgtgtgtaaaatttatattatatatattgagatagaattttgttttgttatttaggttggaatataatggtatgattatgatatatgtattttttattattttagtttaagtgatttttttgttttagtttcggttgggattataggtgggtagtattatttttagttaatgttttttttttttgtagagataagattttattatattgtttaggttggttttaaatttttgggtttaagtaatttttttattttagttttttaaagtgttgggattatagggaagagtttttgtatttagtttgtatatattttttaatgttttaaaataagtttattttaaaagttttttgacgtagtgatatttattaatttttagttttttagaaataaaataagtaagttatattgatgtgaattattaagatattaagaatgaggaaaataaagagtaataaatatatttaacggaattatgatttgtattaaatattgtatagtaatgttttttaagttataaagtgatatttgttatattattagtttttattaaattatattgtaagttggatagttttttaaatattatttaatttagttagatttttaaatgtagttggtattagaatttttagagaagtttgagaaaatatagattttatttatttgtttaatatatttaaggattttgatttagttagtatggaataaagtttatttatatagaatgaatttgtattttaatttgttggttagttgattttaatagtagtggttttcggttttagttaattatttatttaataataattagaagtagtagtagtagtagtaatagtagtaatagtagtaggaggaagttaaagaggtatatatttagaaaataaaaattttaagaaatatttaaaaatttaattattatatttaaaattatttaaattagatacgcgttttttgttttatttttttttttatagttttttatggatatatgttgaaattagttaaataatttttagaatttattgagtgattatgagagttattttgggtttaggaagtaaagtaatttggggaggagtaaaaagagttgattgatggtgttggtttagttaagtaattttttttttttttatcgttttttttaagttgcgtgtttggtgaaagtagttagtttttttatagttagtttatttttatttaaagaaataggtaaaattaatttaggttataatttttttataagttgtaggagaagttaagtttggtttttaattattagttgtgtttaaatggaggggattaaggattatatagatgtataaaaagttaagaaataattatagtagtcgggtgtagtggtttatgtttgtaattttagtattttgggaagacgaggtaggcggattagaaggttaggagtttgagattagttttgttaatatggtaaattttgtttttattaaaaatataaataaattagttaggcgtggtggcgggtgtttgtaattttagttatttgggaggttgaggtaaggagaatcgtttgaatttgggaggtagaggttgtagtgagtcgagattgggttattgtattttagtttgggtgatagtgagagtttttatttaaaaaaaatatatataataataataataatagttattattttatttatgaattagttattgtgttaagtataagttttattttataaaggttaggaaagaggattaaaaaagtatagaatttgtttaaatgatatagttaataaaaggtaatgaggatttaaattgggatttttttgttttaaaggtttatatatttaattattatgttaaattaagttttttagttttttgggtaaattggtagtagatggggatggagaagatagttttaataatattttgaagaagtattaaatggtttttagttttttataatatatattttttatttgattttttaatttaaggttataaagaaaattaatgagaaatagtaggtaaaattattttgtaaatggaagattattgtttagatataggggattattattgtttattttgttagttataaaatttttatttttaggaagagagataaagataaatttatttaaattttaattaaagttagatttttgagttttgtttttagtttaaaatgtatttaagtatttaatattatatttgggaggttttttaggtttataaaaaaagtataaataatttattaataaattgggaagagtggaattgttagaagtaaatagaaaattttggattggggttttttattttagaattttgttttatttgattatatggaataaatataatgtattgattttatataaagaatagaggatgggaaaggaagaggtatggaagttttgaatttaagtttttttaaaagttttattaagtaaaattaatgtaattttatttttttgttttggttaggtggttggttttgtttgttttatttataatagtagaaaattttttttgttttttttttttttgagaaggggtttggttttttgttatttaggttggggtgaagtggtgtaattttagtttattgtaatttttgttttttgggtttaagttatttttttattttagtttttcgagtatcgagtagttgggattatagacgtgtgttattacgttcggttatatttttgttgttatttttttttttaatatagttttattttttcgtttaggttggagtgtagtggcgtaattttggtttattgtaatttttgtttttcgggttcgagtgatttttttgttttagttttttaagtagttgggattataaacgtgtaatattatgtttggttgtaatttttgtaattttagtagagatggggttttattatgttggttaggtttgtttcgaatttttgattttaagtaatgagttggttttagttttttaaagtgttaggattataggcgtaagttattgtattaggtttatttttttgaatttttttttgtagagatggggtttgttacgttgttcgattggtttcgaatttttgagtttaagtaatttgtttatttcggttttttaaagtgttgggattataggtataaattattatatttagttagaaaattttttgagagttaaatttttagaaaaattgaagttttgttattaggttgggcgtggtgttttatgttggtaattttagtagtttgggaggtcgaggtaggtggattatttgaggttaggagtttgagattagtttggttaatatggtgaaatttcgtttttattaaaaatataaaaaataaaaattagttaggcgtggcggtgtgtgtttgtagttttagttatttgggaggttgaggtaggagaattattttaatttaggaggtagaggttgtagtgagttgtattttagtttgggtgatagagtgagaattcgttttaaaaaaaaaaaaaagaaaagaaaaagaaaaagaaattttttattagaaaatttagtggtagtgttttgttatgatgttaatatgaatttgttattggtattgaaaaaataaattacgtagaattaagtggttggtgttagtgttttgaaaaagaagattttatgatttttaagttgtttttagattggttttgggtttatgaaatatataaaaataattttttttatgtaattttatttttttttttatatttgattgtaatagttaaaaagttttaggtgaatattttaatagaagaaataaaatgttttttaaaataagtagttggaaaggtttagagattttttaaagaaaagtttttgaaatatatttataagaatgtattatttgtttggatgaagtggtataaaggaagatattttaggtaagagtaatagaaggaaggttaagaggtaggaaaaaatagggggtgtggaaggaatagtaatataaaaaaataaatttgtagttagaaaaaaaaaaataaagattttaaatgataatgaatattttgtttgtttttaagttgaatatgatttttaatgtgttttataggtagataaatagttaaattttttaagtagaatgtttatatattattgttttttgtttgttcggtaagaaaatacggatagtgttgtttgttttagaaggatttgtgagtttgttattatttgatgttcggcgttgatagttaaattgttgaattattgtaggagagatgtagttggagttattaaatacggtatttttgaatttaaaattattgttgatcgttttttaagttttttgtatgtgttttattgatgtagtttaaataatttttaaatttggtaagaaatataaataattgtaattttagaataaaagtatttaatttaagaatataatatataaagagtaattatgaaaatagtattatgtgggtttttaatgatattttttgtatttattagtaaagaaaagtttttttaatagtatatttttattaaatattttatagatgaggaaaatgggattagtagttaaaagatttagtaagtaattgcggggtacggtggtttacgtttgtaattttagtattttgggaggtcgaggtgggtgtattacgaggttaggagatggagattattttggttaatacggtgaaattttatttttattaaaaatataaaaaattagtcgggcgtggtggcgggcgtttgtagttttagttattcgggaggttgaggtaggagaatggcgggaatttgggaggcggagtttgtagtgagcggagattatgttatcgtattttagtttgggtgatagagtaagattttattttaaaaataaaataaaataaaataaaatatttagtaagggattaggtatagtggtttatgtttgtaattttagtattttgggaggtcgaggttagcgtattatttgaggttaggagtttaagattagtttggttaatatggtaaaatgttgttattatttaaaatataaaaattagttaggtatggtggtgggtgtttgttattttagttattagggaggttgaggtaggagaaattatttgaatttaggaggtggaggttgtagtgagtcgatatcgtgttattgtattttaggttgggggataagagcgagattttattttttaaaaaaaaaaaaaaaagttaatttggaatatgagtttaggttttaagatttttagtttattatttttttaattatattttttttttttttaagtaattattatttttgagtgtgagtaatatattagtattatgagaaatatttgaaaaaaagtgtaagttataatttatgattttaaggaagaaaaattaatatttttaggatgtattttaggtattttataaattattttaagtcgggtatggtggtttatatttgtaattttagtattttgggaggtcgagatgggcggattataaggttaggagatcgagattattttagttaatatagggatattttgtttttattaaaaatataaaaaattagttaggtatggtggcgggcgtttgtagttttagttatttaggaggttgaggtaggggaatggcgtgaattcgggaggtagagtttgcggtgagttgagatcgtattattgtattttagtttgggggatagagtaagattttattttaaaaaaaataataataataaattattttatttaatttgtgtaagaattttaaagattttttttttttttttttttttttgagatagagttttattttattgttaggttggagtgtagtggcgcgattttggtttattgaattttttaggtttaagcgatttttttgttttagtttttcgagtagtcgggattataggtatgtattattacgttcgattgatttttgtatttttagtagagatggggttggttatgttggttaggatggttttaattttttgatttcgtgatttgttcgtttcggttttttaaattacgtttgggattataggtatgagttatcgtgtttagttagatttttaatttttttttttatttatattttttttttaattaatttattttttgagatagggttttgttttgttgtttaggttggggtgtagtgatatgattatagtttattgtagttttaattttttaggtttaaatgatttttttattttagttttttatatagttgggattatagacgtgtattattatgtttagttaatttttaagaatagttttttttgttgagaaaggtttttattatgttgtttaggttggttttgaatttttgagtttaggtaatttattttttttagttttttaaagtattgggattataggtttagttattgtaaatttttttttttttggatatagaagttatgttatttgtttaagaatattttagtagtgggtaaaataattagattttttatttgtttaaatttaaagtttatgaattttttattataatatttagagtttagagtttagtttatttagagtttagagtttagtttatttagagtttagagtttagtttatggttagaaattatgtagaagtaaggggggtagggtttttttttttagaaaattttgaggttgataaggaattttatttttttaagttttttttttttagaaatttgttttattattaatagtagttattatttattaaaagtttattattatgaggtaggatatatagtatatattttaattattatttattttaatatttatagtattattttaggtaggaattatgtttttattttatagttgagaaaatttttatatatatagtttgtaagtggtaaattgggattttgaattgggttgtattgattttatagtttttatttttttatatataatattaatatttaaattattttagttagagttgaaatggtttagaattaaagattatagaatttaaattttgtttttaattaaaagtttttaattgaatatttattatatgttaaattatattatatgtttaaattaagagggaggttagatatttagtatttttagatgatagttaagaaaattaaagaggtttagagataatttaagattataatatggagttatttttatatagtttttgtatattttttttgggaaagaatacggtaatatttattaaaagtttgaaatgtttttaaagaatgatttagtattttattttagaaatttgttttatagaagtttaagataagtgtataaaaatatgtgtaagtatattttttgtagtattatttatatttttgaaaaattgtggtaaagattaaatatttaataatagggaattaaataaattatgttaatatttacgtgataaataaagtagatttatatatatagaggtgggaaaagatatttaagataataaaaaatgaataagtttgaattttttaatattaatttataaagagggaaatttagaaataaataaatggatggggaattttagaattaaagtgttaatagtaattattttagtaggattgtgaagggtttttattttttatattatttattttttgtttttatattttattattatattataaatttttatcggtatattttatttttgtaagaggggatgatagaataagatttcgttgttttttgtttttaaagttttaatttgagttttgatttatttttatataattttatttttaggttattatgaggtttttttttaggagtatatatagttttttttttttttagatttttgagtttttttttaattaaaaaggaaaagatggaggagtttaagattagataagagagaaatagatgacggaagagatagaaggtagatttatttgagtattttattagtttgaaatgatatagtttttaataatttatgtaatagtttgaataggtttaaaatgtaatttattgtgttattttcgttttaaaatttagaataaaatttaaattttttgataaggcgtttaaaggttttttttcgtaatatgttagattttgtgttttaagatttttgaatttcgtgtttttttttatttgtaaggttgaaattttaaaaataggtaagttggtttttttatattttgtttttatttaagagatatttttttagagaggttttttttaattatattagttaaaatagtttgttttttttttgttaattaatattgttttattttttgtatggtatttatgttagatagtttttaagttttagttagtttttttattttttttttgttttataagggtagaattttgttaattttgtttagtatttggaatataaaggtatttaaatatttattaaattaagggaaaagttagaataatgttataaaaatagtaatgtttttaaatagaaaagatttgttaaaaattattaaatgtgaattaaatttttatttagtggtatatttttaaaaaatattttgttagtcgggcgtagttgtttatatttgtaattttagtattttgggaggtttagatgggaggatagtttgaggttaagagtttaagattagtttggttaatatagtaagattttatttttaaatttaaaaaaaaaattttaattataaaaatagtattttgttttttagtaagatgaattgtaataaattttattttttatatagatatatatttttaattgagatgaggttttattatgttgtttaggttggttttgaatttttaggtttaagtatttttgttatatttgtgtttttgtatttagtttgtaatagattttattttatatttaattgtgggggaagattgtattggaattgattgattttaatcgattggtgaagaatttattgataagattaaaatgtaattttagtttaagaatagtaattttataatgaattttaagttttgtaggtatttaaaatatagtgttggtatttagtagagaatatattgtaataatttttaataaaaagtgataaaataaaaatatatttattttatttaatttaagttttagattatttgttatttatagtattttattttttatttttatattaagattatttatagtttaagaggtaggttaagggttgggtgcgggggtttacgtttgtaattttagtatttagggaggtcgaggtagatggattacgaggttaggagatggagattattttggttaatagggtgaaatttttttattaaaaatataaaaaattagtcgggcgtggtggtgggtatttgtagttttagttatttaggaggttgaggtaggagaatggtatgaatttaggaggcggagtttgtagtgagtcgagattatgttat

SEQ ID NO: 423 - DNA, 8711 bp, Artificial Sequence
  chemically treated genomic DNA (Homo sapiens)
tttttttttgttattttttcgtatttatttttattttttttttaagaaagtttatgttattttgtgattttaaatattatttgtaaattgacgtgtaattttttttttatttttatttttatttttgaattttagattaaaatatttagttttttttgtttaattttagttgaaatgtttaatgtgtaagtagagtttgggattttttttttagatttatttttttttggtttttttttattttaggtatagatgtttaatatttagatatttgggataaaaatttaaaggttagttttgtttttttttatttagttaattaggaagttttattaattgtttttttaaaatgtattttaaataatatagtggttaggagagtaggtttttttagtttgaattttggttcggttttgagtaagttgatatttgtgatttagattttttatttgttaaatgaagttaaaatagtatatatcgtttaggattgtaaatatttgaaatgtagtatttagttgaattagtatgtgtagagtgtttagaatagtgttttgtatttagtgagtggttagtaaatgttggttgtttttagtataggtggtattagtagttatacgggaattggtaatattattgttgttgttgttgttgttgttgtattttaagtttttgtttttttttgtatggattattgggatagttttttatatttttaatttttgatatttttattgtttattttttatatattaattagggtaatttttttaaaaatataaattttattattattttttttaaaaattttagaggttttttattgtagttttagtaaaatttaaatattttcggggtttttaaggttttttgtgatttggtttttgtttatttgttaattttatttttttttattttttagttatttattaagtgttgtggtttaaatgtgttttgtaaattttatgtgttggtattttttttttttttttaagacggagttttattttgttgtttaggttggagtgtagtggtacgattttggtttattgtaattttcgttttttgagtttaaacgatttttttgttttagttttttttgtagttgggattataggtatttgttattatattttattaattttttttgtatttttagtagatgtggggttttattatgttggttaggttggttttttgattttaagtgattcgtttatttcggttttttaaagtgttgggattataggtatgagttattgtatttggttatgtgttggaaatttaatttttaaatttatatgttgattggtagtggggttttgggaagtaattaggattagataagattattagggtagggtttttatgatgagattggtggttttgtaagaggtagtaaatttgtttatttgttatgtgatgttttttattagaagttatgtagatgttgttattatgtttttgggatttttagtttttagaagtgtaagagataaatttttttttaaaaaataaattatttagttttagatattttgttatagtaataggaaatagattgatattaggttttatgtattttggtttttttttgttttttagaatatgttttttatttttatttttttttaagttttttgtatttgttattttttgtgtttggagcgttttttttttagagttgattggtttttttaaaatatttaggttttagtttaaatgttatttttttagagttatttttgattatttggttaaagtagtttttttttttattgttgttttatttttttttattgtatttagtattaatggtatttgtttatttgtgtatgtgtttgttttaagttttatataggtaggggttatggtttgtttattatttaaaataatatttagattagggtttgggaattaagtggtggagtgttaagttttttaaaatgggggtcgagtagtttttttttggtagaagtttttttttttggatagttttttaatagtttggaatgtgtagtttatagttattaggaaatgtttgtattttggaaaaatatttttggaaatttttgttttttttgtttttgagttatagattgtgttttaaattattttagaaggaaaagtgttttaatttagttgtagtgattgttaagtgtttttttttgaatatatatatatatatatatatatatatatataatttttagagtattaattgatatggtaatgttttgagtttatgtgatatgtattgttttaaaaataaaatagtagatatattagttgtgatatgattataattgttagtaagtaatgattataataaagaagttattttttgatgtatttaggaatattagtaatagtatgttttataaattggtttagatttggtattttttagatttttagttatttgtagtgtattgtaatttttattgtttttgagtagtgataagtatttataatttaatggttatgtttttaatatttaggtaaaagagtggttgaatttgtgtttgttgagttaaattgaatttttagtttgtaagtgtaaattttttgttatacgtttaatagtttaaattgtttttgttaaaatgtttttgatagaatgataagaataggatgaaaaaatgtatttatgtatatgtgattttagttatgttaaatgtagattgaaagtagtttttaaggaggtatgttagtttgtttatattgttaaatggatagtaggattatgggggattttttttaatatttttatatattgggtaagtaggtatatgggaatgatttatgggtgagatttgaagtcgtatttagtttttgggtgttttgtatagttcgtatgtgaggtatagatttatggtagattgttttggtttatttgtgattgaatttttagtagtaagagttgttttatatcggtataatttaaaagtaggggtgtttaattttttggttttttcgggttatattggaagaagaattgttttgggttagatataaaatatattaacgatagttgatgagttaaaaaaaaaaaaaaaagaaaaaaaaaagttgtataatgttttaagaaagtttataaatttgtgttgggtatttaaagggtcgtatgtggtttacgggttataggttggataagtttggtttaaagtattttttagggttaagttagattgtaaatatttgtgtatttatttatttatttaatgtttttgtattaaatggcggattttgttagttatgttagttatattaagtagattattaatttaagtgaatatggttttgaatttattgtttttggtatattagaggaatatttatattattaagttggtgtaaaagtaattgcggttttgttattgaaagtaatggttaaaatcgtaattattttggcgttaatttaatatatatttaggtaattttaatttgtgataaggattatgaaggaaaagtattagatgttatttgagagtatagagtagaggagaatttaatttaggttgagagttttaggtaaggttgagatttaaaaattaagaggagttagttagatggaataagaatatgttagatagaggaagttgtatggtaaaggttaagaggtttagaaaagtgaaaaatagaaggagatcgttgtgggtttgatgtagttgagttaggaaagattggtttaagatagagaggtaaataggagggggcgtggttttgggagttgtaatttagaaagttgtttgtgttcgaaataagttaaagagttgttgaggataaggggtgtaatttttttaatttttaataataaaaagtttttttgtttggatttttatatacgtttagagtgtttgttgtggttttataggattttttttaaggttaagttagtatggtcgaaggttattataatttttgtaagaatttggtttttttatattgagtgtaaaaatgtattaaatagtggatgttttgagaaaagtgaaggtatgttagatttaagtatttaagttagattggttagttattttaagaaatagatgttttagtaatttgttagttggggtatatagtgttgaattttgtttataattttattattaagttgttgggatgggatgtttttttttataaaatagtagtaagtaagtattttaatgaggtttttaatgtgaggtatgatgtagtaaatatattagtagtttttttttggttatttgttttttatttaagagaaatattttggtcgggggtgcggtggtttacgtttgtaattttagtattttgggaggttaaggtaggcggattattagaggttaggagtttgagattagtttggttaatatggcgaaattttgtttttattaaaaatgtaaaagttagttaagtatggtggtgcgcgtttgtagttttagttatttaggaggttgaggtataagaatcgtttgaatttgggaggtggaggttatagtaagtcgagattacgttattgtattttagtttgggcgatagagcgagatttcgttttaaaaaaaaaaaaaaaaaaggaagaaatatttttttaattattgttaatataaattagtgtgaaaataaagagattttttagtttgttttcgtatttgtgtggatatattgtagtgtagttgatattttattattgttagtatgtagttgtattgggaaatttttatttttgattatagtttattattgaaatttaattattttaagagaaatgtttttgagttataggtttgttttattgttatggtattttttgataaatggtttatggttttttttttaagtgagtatattttatttgttatttgtttaaaattattatagattgaaaattagtatattgaattttaaggatatattttttttttatattggaattttaaagaagaatgtattgagtattatttatttttttattttttttagattttttttaattttttggtgaaaattgagatataaaatggttgtaaataagtttaagggttagaattttttggttttatataaagttattatggtgggtagtggtggcgtgggtaagttagttttgattttatagtttatgtacgatgaggtaagtgttaattttataatggattaaagtttaggtttttagagagtatttttttagtttagttttggtgttattttgtatggattgtttgaatttttgaaattattaataattttttttttatttttgtgtttagagttatttgtatataatttgattttataaattaggaatttatggtttttaaaaattttaggttttaaaaataaagttaaattaaaaatagtacgtttttttttagtaatttaattttagtttttttgtttttaggttttattggcgatttttatttttaattaatagaagtggtgtgtataatatttaagagagatttgaggttaatatatataaaatattttttaggttgggtacgtacggtggtttacgtttaattttagtattttgggaggttaagataggtagattataaggttaggagatcgagattattttggttaatacggtgaaatttcgtttatattaaaaatataaaaaattaattgggtatggtggcgggtgtttgtagttttagttattcgggaggttgaggtaggagaatggtgtgaatttgggaggcggagtttgtagtgagtcgagatcgcgttattgtattttagtttgggcgatagagtaagattttattttaaaaaaaaaaaaaaatttttttaataaatttgatgaaaaagtcgtttattgtgtgtttggtatggtattatatttattattaagtaggttaagttattaaaatttataattattatataggttatagatttgtatgtatgtatttatattagattttattatttttgagttaaggtgtagtttatatatagtaatatagtttttttttgtaggaatgttattaagttttaatgatttaagagttggtaatttaatgtaagtatttatttttatttttgtttttttttaataaaagttaggttttatggttgtagataatttagttttcgtaataattttgtgtgggagatggtgatatttttattttatagatgtgaaaatagaattttagagagttatttagtttatttaagaaaagtgatttgtgatgagtaataaagtgttaaatttagttttttgattaaaaatatttttatagattttttttattttatgtttttatttttttttttattttttattttttttaaatagagattaggtttttattttgttgtttagggcgatttttttattttgggtttttaaagttgggattataggtatgagttagtgtatttaattttttatgtttttttttgttgtttgtgttttattattttttttatatatatatataaaatttttaaatttgttagttgttatgtttgttagtgagcgaattaaaaagtttagggaaggcgtaggttggagaattatttgaggttaggagtttgaattagttggtaataaagtgagattttgtttttatgaaaaaattaaaaaattagttgggcgtggtgttgtatgtttgtttttttagttatttaggaggttgaggtaggaggattatttgtattggaggttatagtgagtaatgattgtgttattgtattttagtttatataatagagtaagatttttgttttttaaaaaaaaaaaaagtttgtggagagtggattgaaatggtattttaaatgaaattattgatttatttattgaattttttgttttatattgtttatttaagagttaatttttttttagattaatttttaaattagtttttttttgataataaggaagttaaaagtaagaatatttatatgtttaatttttttttttttttttttaaagataacgttttgttttgttgttttggtagtgatgtagttttagtttattgtaatttttattttttaggtttaagcgatttttttattttagttttttaagtagttgagattataggtatgtgttattatgtttagttaattgttgtatatttttgtagcgacggggtgtattcgtttgtttttatattgttataaagaagtatttgatattggggtaatttatgaataaaagagatttaattgatttatagttttataggtttaataggaagtatgattaggaggttttaggagatttgtaattgtggtagagggtgaagggaaagtaagtgtatttttatatgttgggataggggagggagagagagagagtgtgagcgagtatacgcgagtaagggaggaagtgttatatattttaaaaattattagatttcgtgagaatttataattttgagaatagtatgagggaaatttgtttttatgatttagttattttttatttgattttttttttagtattgggaattatagtttaatatgagatttgggtggggatatagagttaaattatattacggggttttgttatgtgttttagtttgattttgaattaatttttgggtttaagtgatttatttattttagtttttttaattgttggtattataggtatgagttattatatttagtttatatgtttaatttgtaatgaatgattaagtatattaatagtatgtaaatgtggtggaatgttatttaatttttatagttataaatatattgtgtttatttttaaaataattatttattgagtattttttatgtaataggtattgttataggttttagagatataatgatgaatagtatatgtaaggtttttgttttgaggggttaaattttaatgataagatatagttatagtaaataaataagaatgtattagataatgaaaatatttataagagttaataaaaaatttataaatgtttgtgtgtaaatgaatatatgttaataatgatattaaaagataggtcgggtttggtggtttatatttgtgattttaatattttgggagattaaggtagtaggattatttgagtttaggagtttaagattagtttgggtaatatagtaaggttttgtttgcgtatatatatatatatttattatttgtttgtttacggtttattaaggtatattaaagtgagatttatggggttgacgataggagtgggaatgtaaagttgttgaattgtattatttaaaaaattaaaagtttgggaagaagttttataaagtttaagatttgattttttgttgagtagtgtaaattattttattgatttagtttattttagaaaaagaaaggatttaatgatatttttagtgtttattaaaatattgatttttaagttatttttatagttttagtatgaaaatttatatttagagttatatagaaaaaagattattataaatttggtaaaatatatgtgtaatagtttttgtaggtattgtgttttaaggaagaaaagttgtttttaagttgtaaatagtttagaggtaataatttagttttttttgtttgtaaatgaggaaattaagaaattgtttaaaattaaaattagtgtagtttttattattggaggaatttgggtaaagggtatatagaattttttttgtattattttggtagttttatatgaatttataattattttaaaataagttttgaaacgtaataattaaaaaattggtgtgtttttattttttttagt

SEQ ID NO: 424 - DNA, 8711 bp, Artificial Sequence
  chemically treated genomic DNA (Homo sapiens)
attagaaaagataaaaatatattaattttttaattattacgttttaaaatttattttgaaataattataaatttatgtgaagttgttaaaatagtataagaagagttttgtatattttttgtttagatttttttaatggtaaaaattatattaattttaattttagataattttttggtttttttatttgtaaatagagagggttgagttattatttttaggttgtttatagtttgaaaatagttttttttttttaaaatataatatttgtaaaaattattatatatatattttattaaatttataatagttttttttttatgtaattttgaatataaatttttatgttagaattgtggaaataatttaaaggttaatattttggtaagtattgaaagtattattaaattttttttttttttaaaatgaattaagttaataaagtgatttatattatttaatagaaagttaaattttaaattttatgagatttttttttaaatttttgattttttaaatagtataatttaataattttatatttttatttttatcgttagttttataaattttattttaatatattttgataaatcgtaggtaggtagatgataagtatgtgtatatgtacgtagataaggttttattatgttgtttaggttggttttgaatttttgggtttaaataattttattgttttggttttttaaagtgttgggattataggtgtgagttattaggttcggtttattttttgatattattgttagtatgtatttatttatatatagatatttgtgggttttttattagtttttgtaaatatttttattatttgatatatttttatttatttgttatgattgtattttgttattagaatttaattttttagagtagggattttgtatatgttatttattattatatttttaaagtttataatagtgtttgttatatgggagatatttaataaataattattttaaaaatggatatagtgtatttgtaattgtaaaagttaaataatattttattatatttatatgttattaatgtgtttagttatttattataagttaggtatgtgggttgggtgtggtggtttatgtttgtaatgttagtagttagggaggttgaggtgagtggattatttgagtttaggagttagtttaagattagattgggatatatggtaaaatttcgtgatatggtttggttttgtgtttttatttaaattttatgttgaattgtaatttttaatgttgggggagggattaggtgggaggtgattggattatgggggtagattttttttatgttgtttttaagattgtgagtttttacgagatttgatggtttttaaagtgtgtggtatttttttttttgttcgcgtgtgttcgtttatatttttttttttttttttttttgttttaatatgtgaggatgtatttgttttttttttattttttgttataattgtaggttttttgaagttttttagttatgttttttgttaagtttgtggaattgtgagttaattaaattttttttatttataaattattttagtgttaggtatttttttatagtagtgtgagaatagacggatatatttcgtcgttataaaaatatataataattagttgggtatagtggtatatgtttatagttttagttatttggaaggttgaaatgggaggatcgtttgagtttgggaggtggaggttgtagtgagttgagattgtattattgttagggtaatagagtaagacgttatttttaaaaaaaaaaaaaaaaaaattaggtatgtgaatatttttatttttggtttttttattgttaagaggagattgatttaaggattagtttgagagaagattagtttttaaataaatagtatgaaataaagaatttaatgaataaattagtaattttatttaaagtattattttaatttattttttataaattttttttttttttaagagataggggttttgttttgttgtgtaggttggaatgtagtggtatagttattgtttattgtgatttttaatgtaaatgatttttttgttttagttttttaagtaattaggaaaataggtatgtagtattacgtttagttaattttttaatttttttatagagatagggttttattttgttgttagttggtttaagtttttagttttaagtgattttttagtttacgttttttttaaattttttaattcgtttattaataagtatggtaattgatagatttaagggttttatgtatgtgtgtaaaaagaatggtgagatataggtaatagaaaaagatatggggggttgggtgtattggtttatatttgtaattttagttttgggagtttaaggtgggaggatcgttttgggtaatagagtgagaatttggtttttatttaaaaaaaataaaaggtaaaaaaagagataaagatatggggtgggaaaaatttgtagggatatttttagttaaaagattaggtttaatattttgttgtttattatagattattttttttgggtaagttgggtaattttttgaggttttgtttttatatttgtaaaatggggatattattattttttatataagattgttacgaggattaagttgtttgtaattataaaatttggtttttgttgggagaaaatagaagtgaggataaatgtttatattggattattaatttttaaattattaagatttgataatatttttgtagggaaagattatattgttatatataggttatattttaatttagggatgatgaagtttgatatgaatatatgtatataaatttgtaatttgtgtggtaattataaattttagtgatttggtttgtttaatgatgaatgtagtgttatgttaaatatataataaacgatttttttattaagtttattaaaagaatttttttttttttttgggatggagttttgttttgtcgtttaggttggagtgtagtggcgcgatttcggtttattgtaagtttcgttttttaggtttatattatttttttgttttagtttttcgagtagttgggattataggtattcgttattatgtttagttaattttttgtatttttagtatagacggggttttatcgtgttagttaggatggtttcgattttttaattttgtgatttgtttgttttggttttttaaagtgttgggattaggcgtgagttatcgtgcgtgtttagtttaaaagatattttatatatgttaattttaagttttttttaagtattatatatattatttttattaattaaaggtaggaatcgttaataaaatttaaaaataaaaaagttaaagttagattattaaaaaaaggcgtattgtttttagtttagttttgtttttaaagtttgaggtttttaaggattataagtttttgatttgtaaaattaagttatgtatagatggttttaaatataaaaatgaaaaaaaaattattagtaattttaaggatttaaataatttatataaaatagtattaaaattaagttagggaaatattttttgaaagtttaaattttgatttattataaaattagtatttattttatcgtatatgaattgtagagttagagttgatttgtttacgttattattgtttattatgatgattttgtgtaaagttaaagaattttgatttttgggtttatttgtagttattttgtgttttagtttttattaaaggattaagaagaatttaagaagaatgaaagaataagtaatgtttagtatatttttttttagaattttagtgtaagaaagagatatgtttttagagtttaatatattagtttttaatttgtagtgattttaaatagatggtaaatgaagtatgtttatttaggggaaaaattatgaattatttattagagaatattatggtaataaaataagtttatgatttaagggtattttttttaaaatagttgggttttagtaatgagttatgattaaaagtgaaaattttttagtataattgtatgttgataataatggggtattagttgtattgtaatatgtttatatagatacgaaagtaggttaaaggatttttttgtttttatattaatttatattggtaataattaaagagatgttttttttttttttttttttttttttgagacggagtttcgttttgtcgtttaggttggagtgtagtggcgtgatttcggtttattgtagtttttattttttaggtttaagcgatttttgtgttttagttttttgagtagttgggattataagcgcgtattattatgtttggttagtttttgtatttttagtagagatagggtttcgttatgttggttaggttggttttaaatttttggtttttaatgattcgtttgttttggttttttaaagtgttgggattataggcgtgagttatcgtattttcgattaagatgttttttttgagtaagaaataagtgattaaaaaaagattgttaatgtgtttattatattatgttttatattaaggattttattgaaatgtttatttattgttattttatagaagaagatattttattttaataatttggtggtagaattataaatagaatttaatattgtatattttaattaatagattattggaatatttgttttttgggatggttggttaatttaatttaaatgtttggatttagtatgtttttattttttttagagtatttattgtttaatatatttttatatttagtgtggagaggttaggtttttatagaagttgtagtgattttcggttatgttgatttggttttagaaaaaattttgtgaggttataataaatattttgaacgtgtgtggagatttaagtaaagagattttttgttattgggggttgagggggttgtattttttgtttttagtaattttttgatttgtttcggatataaatagttttttaagttgtagtttttagaattacgtttttttttgtttatttttttattttgggttaattttttttagtttagttgtattagatttataacggtttttttttgttttttatttttttaagttttttggtttttgttatgtagttttttttgtttggtatatttttattttatttggttaattttttttggtttttgggttttagttttatttgaaatttttaatttaaattaggtttttttttgttttgtgtttttagatagtatttgatattttttttttataatttttattataagttgaaattgtttgaatatgtattaggttggcgttaaagtaattgcggttttggttattatttttaatggtaaaatcgtaattatttttgtattaatttaatagtataagtatttttttagtatattagaaatagtgagtttaggattatgtttatttgggttaatagtttgtttaatgtaattaatatggttggtaaaattcgttatttagtgtaaaagtattgaatgaatgaatgaatatataaatgtttgtagtttgatttaattttgagaaatgttttaagttaagtttgtttaatttgtggttcgtgggttatatgcggttttttgaatgtttaatataaatttgtaaatttttttaaaatattatgtaattttttttttttttttttttttttttttagtttattagttatcgttagtgtattttatgtttggtttaagataattttttttttaatgtggttcggggaagttagaagattggatatttttgtttttaggttgtatcggtgtaaagtagtttttgttattagaggtttaattataaatgggttaggataatttgttatgggtttgtgttttatatacgggttgtatagggtatttaagaattgggtgcggttttaggttttatttataaattatttttatatgtttgtttgtttaatatataaaagtattaagaaaaattttttataattttattgtttatttagtaatatgaataggttaatatatttttttggagattgtttttaatttatatttaatataattgagattatatatatataaatgtatttttttattttgtttttattattttattaaaagtattttagtagaagtagtttgaattgttaagcgtatggtaaaaaatttatatttataggttaagagtttaatttaatttaataaatataaatttagttatttttttatttgggtattgagaatatgattattagattgtgagtgtttattattgtttaaaaatagtgaaaattatagtatattgtaggtaattaaaagtttgaaagatattaagtttaagttagtttatgaagtatgttgttgttggtgtttttaaatatattaggaagtgatttttttattatgattattatttgttggtagttataattatgttatagttaatatatttattgttttatttttaaaatagtatatattatatgagtttagggtattattatattaattaatattttaagagttgtgtgtgtgtgtgtgtgtgtgtgtgtgtgtgtttaaaagaaaatatttagtagttattataattgggttaaaatatttttttttttagaataatttaaaatataatttgtgatttagaagtagaaaagatagagatttttaaggatgtttttttaaagtgtaaatattttttaataattatgagttgtatattttagattattaagaggttatttaggaaaagaagtttttgttaaggaaaaattattcgatttttattttaaaagatttggtattttattatttaatttttaagttttggtttagatattgttttgaatgataaataagttatagtttttgtttatgtggaatttaagataaatatatatataaataagtaaatattattagtgttaagtgtaatgaaaaaaaataagatagtaatggggggaggagttattttaattagatggttaaggatgattttgaagaggtggtatttgagttgagatttgaatgttttgaagaaattagttagttttgagggaagagcgttttagatatagggaataataagtataaagaatttagaagagggtgggagtggggagtatgttttaggaagtagaagaaggttagagtatatgaagtttagtgttagtttgttttttgttgttataatagagtatttgagattgggtaatttattttttaaaaagaaatttattttttatatttttgaaggttgggaattttaagagtatggtggtagtatttatatggtttttggtggaaggtattatatggtaagtgggtaagtttgttgttttttataaagttattagttttattatgggggttttattttgatgattttatttaattttaattattttttaaagttttattgttaattaatatatgaatttggggattaaatttttaatatatggttaggtgtagtggtttatgtttgtaattttagtattttgggaggtcgaggtgggcggattatttgaggttaggagattagtttggttaatatggtgaaattttatatttattaaaaatataaaaaaaattagtggggtgtggtggtaggtgtttgtaattttagttataagggaggttgaggtaggagaatcgtttgaatttaggaggcggaggttgtagtgagttaagatcgtgttattgtattttagtttgggtaatagagtgagatttcgttttagaaagaaaaaaaaagtgttaatatatgaaatttgtaggatatatttaaattatagtatttagtgaatgattggagagtaagaggaggtaaaattgataggtaggtagaggttaaattataaaaagttttgaaggtttcggaagtgtttggattttattagaattgtaatgggaagtttttggagtttttaagaaggatagtggtaaaatttgtgtttttaaaaagattattttggttggtgtgtagagaatggatagtggaagtattaagagttgaaagtataggaggttattttagtaatttatgtaagagaggatagaggtttggggtatagtagtagtagtagtagtagtaatggtattattagttttcgtataattattaatattatttatattgaggataattaatatttattgattatttattaagtgtaaggtattgttttgagtattttgtatatattaatttagttgagtattatattttagatatttataattttaggcgatatgtattattttaattttatttaatagatgaggaatttgggttatagatgttaatttgtttaagatcgagttagaatttaaattgagggagtttgtttttttaattattatgttatttggaatatattttgaagaaatagttgataggattttttgattgattggatgggagaaaataagattaatttttaagtttttgttttaaatatttgaatgttaggtatttatatttaagatggagaaggattaagaaggaataggtttgggaaagaaattttaagttttgtttgtatattagatattttaattagagttgaataagaaaaattgaatgttttagtttagagtttagggatgagggtagagatggaaaaaaaattgtacgttagtttatagatgatatttgaagttataaaatggtatgagtttttttagggagaagatgaagatagatacgagaaagtggtaaaggaaag

SEQ ID NO: 425 - DNA, 5156 bp, Artificial Sequence
  chemically treated genomic DNA (Homo sapiens)
  unsure 4302: n is a or g or c or t
tatttgggaggttgaggtaggagaattgtttgtattcgggaggtagaggttgtagtgagtcgagattgtattattgtattttagtttgggtagtaagagcgaaattttattttaaaaaaaaaaaaggaaaaagaaaagaaatatttttttatattaaatagtaaagaagttattataggttattgtaattgtttttttaaaattatttttttaatagatatagggattttgttatgttgattaggttggttttaaatttttggttttaattagttttttttatttagttttttaaagtgttgggattataggtatgagttattaagatttatatattggaattgtgttaaaaggattgaagaataattaatttgaagaagttttttttaattaaagacgaataatttgaattttaataattatatttgattaaaatatagttaatatatttaaatttatgtatttattaagattttaaaaaatttagtcgggtttggtagtttatgtttgtaattttaatattttgggaggttgagatagaaggatcgtttgagtttagaggttcgagattagttttggtaatatagtaagattttgtgtttattaaaaattaaaaaaaagaaattagttgagtgtggtggtgtacgttgttagttttagttatttgggaggttaaggtgggaggattgtttgagtttaggagtttgaggttgtagtgagtaacgagttatgttatagtattttagtatggcgatagagattttgttttaaaaaattgttttttttttaattagttgtgtgtggtggtgagtgtttatagttttagttatttgggaggtcgaggtaagaggattttaattgataggggcgttggtgggagaaaaagtaggtttattgatttattttgaaagttagtaagattgagaggacggtgtattagcgttttaaagtattattttaagttagtataattttaggttttttttatgttaagggtagggaagagaaggagggtgtggttaagaagtattttatggtagatatttgggtagtagcgagggtttgaggaggttgggaatttttttgtttttggtttagttataatgtttttataaatttttaagaaaatatagttgtttatatatttttttaattttagattaagttttaaaaattatatgattgttgtttttatatattatttagtgttttaaagtttatggtagtaaaaaattagaagtttaaatgtttatggttgggtacggtagtttacgtttgtaatagtattttaggaggtcgagacgggtagattatttgaggttaggagttagagattattttggttaatatggtgaaattttgtttttattaaaagtataaaattagttagatgtagtggtttatgtttgtaattttaatatttttagaggttgaggtaggtggattatttaaggttaggagtttgagattagtttggttaatatggtgaaatttcgtttttattaaaaatataaaaagttagttaggtatggtggtaggtatttgtaattttagttatttaggtggttgaggtaggagaattatttgaatttgggaggtagaggttgttgtgagtcgagattgtgttattgttataataagagcgaaattttgttttaaaagaaaaaaaaaatataaaattagtcgggtatggtgatgtatatttgtaattttagttatttaggaggttaaggtaggagaattatttgaatttgggaggtagaggttgtagtgagtcgagatggtgttattgtatttagtttgggttataagagaggaattttattttaaaaaaataaaaataaaaatgtttatttttaggatgaataaataaattgtggtatatttatataataaaatagtatatagtagtgaaaaagtgaattaattgtgaaatatgaattatagtaataggttgagtgaaaaaagtaagtaataaaggataataaattatatgatgttttttttataaaagtttaaaattggttgggtgcggtggtttatatttgtaattttagtattttgggaggtagaggttggcgaattatttgaggttaggagttcgagattagtttggttaatatggtgaaattcgtttttattaaaaaaatataaaaattagttgggcgtggtggttggtttttttaattttagttatttaggaggttgaggtaggagaatcgtttgaatttaggaggtagaggttgtagtaagtagaatgttattgtattttagtttgcgcgatagagtgagattttgttttaaaaaaaaaaaaaaaaaagtttaaaattaaggaaaattaaaagatatattgtgtaggtatgtagatataattttttttttttttaaaatatagaattttgggttaggtgtggtggtttatgttgtaattttattttgggaggttgaggtgggaggatcgtttgagtttaggagtttgagattagtttgggtaatatagtgagatttatttttatttataataaattaattaattaattaatttaaaaaatatagaattttggtttagcgtggtggtttacgtttgtaattttagtattttgtgaggttaagcggggaggaaagttgagtttaggagtttaagattagtttggataataaggttaaattatttttttataaaaaatataaaaatttagtcgggtatggtggtgtgttttcgtagttttagttatgtaagaggttgaagtgggaggattgtttgagtttaggaggtagaggttgtagtgagtagagattgtgttattgtattttagtttgggcgatagagatagatcgtgttttaaaaaataaataaataaataaatataatataatataatataatataatataatatagaattttggatggtggtggttttttgagttttgtaatgggtatatgggtgtttatcgtattaatttaaaagttataaatatatatgaattttaagaagaggatttatgtaaggtttaatgataattgtatattattaattaaagattttaattaatttattttgttatttgaagtcggtttttttcgttttttgttaaaagtaaatatttttttaattagggttagttattggagaaattgaaatgagtgggcggggtgttaattttatttttatttttttttttttgtttttttagagtttggaaataagttagaatttttaattttttttaatttttatatgattttttaatttaagacgaatttagagaaaataaaaaagtttttttttatttggagaagatttcgttttttgtagtggagtatttttttttggggatgaggtttggggtgggggtgcgttagttttagtttttatacggagcggtttttgggtttggttttgggggagttatttgtattgtggggttatatgatagaattagtggttagttttagttggaggtttagggtaaatacgaggcgggggtaggggggtggggggtcgtgagtttgttgatttaagtgttttgtgggtttcgtattttttgagatataagcgttaggttttagagacgaggtttcgggatttatttttgggggttttttgtttttatagtcgatgagagtcggtagtttggttgtatcgtaagttggcgttttagttggagagggacgagttttcggttagttcgttagcgggagggttttagtcgttttattcgggttgtaggtttcgtaaagtttttgatgtattgttaggttgggaggttcggtcgtttttatttttttatagtcgtatttagattggggtgggtaggatattttaacgtgtttttgagatagttattatcgaaaggtatttttagcggttaggaaattcgcgcggagtttaattattcggtttttgcggagtagaacgcggtcgggtttttttttgcgcggggcgggcggtcgtagtttagtagttttggtttgttttagattcggtttagagtgatattattaaatttcgtcgatcggcgggagggggttttgaaattttttaaaaataaagtgagtaatcggcggatttatttttttaggcggggtcgggattcgggagttagtcgagttatcggtacgttagttttttcgttttcgggaggcgcgtatttggtttcgattttcggtagcggttgtgcgtgtagttttttcgtttttcgcgcggcgtgtattatagattcgtcgtttcgcgggcggcggcggggtaggagcgcggcggatttcgggtagtgagcgacggcgggcgcgggcgtatgntcgtttggcgaatggttcgtttgtagtgtaacgtcgggtttagttgcgatttcgttacgtttcgagatttcggttatggacggtgaggtcgttttttgatttcgcggggtgtaatcgtcggggtcgtacggttgtgcggagtcgtacgcgtcgcgttttcgttttattttcgtcgacggagttgcgtagggagcggtcggtttgtcggatggtggcgcggggcggggtaggcggggaggggtttgatttagttttttttttgggtggagggggtggtttttgatttagtattttttttgggtgggggagtagagggaattttgatttagtttttttttatatcgtttatgggggtagttttggtttcgtttttttattaggggagaacgtatttgatttagttttttttttggagggaggtggggcgtgtttttttttaattttttttaagaaagtataataggttttgatttagtttttttttggagaagaaggattttttatttcgtttttttttaagaagtaggtgtttttggttttttttttttattttttagttttatcgtaggttttagggagtaggttttgatttagtttttttgggagggagtttggtttttttttttcgtggagagtagatttttttttgtgagaatgggtattgggtgtgtgttgattttgatttttttttttttttagaattgtttttttttattttttcggtaggtaagtggttttcgcggcggtcggggaggtgttttttggggtagggtagtgggggtagtcgttaatggggttgcggtgttttttggtagacgatttaggtttttgcgtttatgtggagattattgagt

SEQ ID NO: 426 - DNA, 5156 bp, Artificial Sequence
  chemically treated genomic DNA (Homo sapiens)
  unsure 855: n is a or g or c or t
gtttaatgatttttatataggcgtagaggtttgggtcgtttgttaggggatatcgtagttttattagcggttgtttttattgttttattttagggagtattttttcgatcgtcgcgggggttatttatttgtcgggaagatgagggggaatagttttgaaaggggagggagattagggttagtatatatttaatgtttatttttataaggaggaatttgttttttacggagaggagaagttaggtttttttttaggggaattgagttaggatttgttttttagaatttgcggtgaaattaaggggtggaggaaaggaattagaaatatttgttttttgagggaaaacggggtaaggaattttttttttttagagggaagttgaattagggtttgttgtatttttttaaggaaaattgagggagggtacgttttatttttttttagagaggaaattgaattagatgcgtttttttttaatagggaaacgaagttagagttgtttttatggacggtgtggagggaaattgagttaaggttttttttgtttttttatttagggaggatgttgagttaagggttattttttttatttagaggggaaattgagttagattttttttcgtttgtttcgtttcgcgttattattcggtaggtcgatcgttttttgcgtagtttcgtcgacgggaatggggcggaaacgcggcgcgtgcggtttcgtatagtcgtgcggtttcggcgattgtatttcgcggggttagagggcgattttatcgtttatggtcggggtttcggggcgtggcggggtcgtagttgggttcggcgttgtattatagacgagttattcgttagacgantatgcgttcgcgttcgtcgtcgtttattgttcggaattcgtcgcgtttttgtttcgtcgtcgttcgcgaggcggcgagtttatagtgtacgtcgcgcggaggacgaagaggttgtacgtatagtcgttgtcgggggtcggggttaagtgcgcgtttttcgaggacgaagaggttggcgtgtcggtggttcggttagttttcgggtttcggtttcgtttggaagggtgggttcgtcgattatttattttgtttttaggggattttagggttttttttcgtcgatcggcggagtttggtgatgttattttgggtcgggtttggagtaaattagggttattgggttgcggtcgttcgtttcgcgtagggaaaagttcgatcgcgttttgtttcgtagaggtcgggtggttgaatttcgcgcgggttttttaatcgttaaaggtgtttttcggtggtggttgttttagaagtacgttaaaatgttttatttattttaatttagatgcggttgtgggggaatgggagcggtcggattttttagtttgatagtgtattaagagttttgcggagtttatagttcggatgggacgattgaggttttttcgttggcgagttggtcgagggttcgtttttttttagttaaagcgttagtttacgatatagttaaattgtcggtttttatcggttgtgggagtaggaggtttttaggggtaaatttcggagtttcgtttttgaagtttggcgtttgtgttttagaaggtgcgggatttataggatatttgaattagtaggtttacgattttttatttttttgttttcgtttcgtgtttgttttggatttttagttagggttgattattaattttgttatgtgattttatagtgtaggtagtttttttaagattaagtttaagggtcgtttcgtgtggaggttggggttgacgtatttttattttaggttttatttttaaaggaggatgttttattgtagggggcggagttttttttagatggagaaagatttttttattttttttgaattcgttttaaattaggaaattatgtgggaattggaaaagattggaaattttgatttgtttttaggttttgaagaaataggaagagaaaagtgaaaatagagttagtatttcgtttatttattttagtttttttagtggttggttttgattagaaaagtgtttatttttggtagggggcgggggaggtcgattttaggtgatagaatggattaattaaaatttttggttaatgatatataattattattgaattttgtatggattttttttttaaaatttatgtatatttataatttttaaattaatacgataaatatttatgtatttattgtaaaatttaaggggttattattatttagaattttgtattgtattgtattgtattgtattgtattgtatttatttatttatttattttttgagatacggtttgtttttgtcgtttaggttggagtgtagtggtataatttttgtttattgtagtttttattttttgggtttaagtaatttttttattttagttttttgtatagttgggattacgggagtatattattatgttcggttaagtttttgtattttttgtaaagaagtggtttaattttgttgtttaggttagttttgaatttttgagtttaattttttttttcgtttggttttataaagtgttgggattataggcgtgagttattacgttgggttagaattttgtattttttaaattaattaattaattaatttattgtaaatagagatgggttttattgtgttgtttaggttggttttaaatttttgggtttaagcgatttttttattttagttttttaaagtgggattatagtatgagttattatatttggtttagaattttgtattttaaagaaaaaaaaagttatatttgtatgtttatataatatattttttggttttttttagttttgaatttttttttttttttttttgagataaagttttattttgtcgcgtaggttggaatgtagtggtattttgtttattgtaatttttgttttttaggtttaagcgatttttttgttttagttttttgagtagttgggattaaaggggttaattattacgtttagttaatttttgtatttttttagtagagacgggttttattatgttggttaggttggtttcgaatttttgattttaggtgattcgttagtttttgttttttaaagtgttgagattataggtgtgagttatcgtatttagttagttttgaatttttatgaagagggtattatatgatttgttgttttttgttatttgttttttttatttaatttgttattatgatttatgttttatagttaatttatttttttattgttgtatattattttgttgtgtaaatatattatagtttgtttatttattttgaagataggtatttttatttttatttttttgagatggagttttttttttgtggtttaggttggatgtaatagtattatttcggtttattgtaatttttgttttttaggtttaagtgatttttttgttttagttttttgagtagttaggattataggtatgtattattatgttcggttaattttgtatttttttttttttttgagatagagtttcgtttttgttgtggtaatggtataatttcggtttatagtaatttttgttttttaggtttaagtgatttttttgttttagttatttgagtagttgggattataggtgtttgttattatgtttggttaattttttgtatttttagtagagacggggttttattatgttggttaggttggttttaaatttttgattttaggtgatttatttgttttagtttttgaaaatgttgggattataggtatgaattattgtatttgattaattttgtatttttagtagagatagggttttattatgttggttagggtggtttttaatttttgattttaggtgatttgttcgtttcggttttttaaagtgttattataggcgtgagttatcgtgtttagttatgggtatttggatttttaattttttgttgttataagttttagagtattgagtaatatataaaaatagtaattatgtagtttttaaaatttagtttggggttaaagaagtatgtaaataattatgtttttttaaagatttataggagtattgtgattggattaaggataaagaagtttttaatttttttagattttcgttgttgtttagatgtttgttatggggtattttttgattatatttttttttttttttttgtttttaatatagaaagagtttaagattgtattgatttaaaatggtattttagaacgttagtatatcgtttttttagttttgttggtttttagaataaattagtaaatttatttttttttttattaacgtttttattagttgggatttttttatttcggttttttaggtagttgggattataagtatttattattatatatagttaattaaaaagaaaataattttttgaggtagggtttttgtcgttatgttggaatgttgtggtatgattcgttgtttattgtagttttaaatttttgggtttaagtaatttttttattttagttttttaagtagttaggattaatagcgtgtattattatatttagttaattttttttttttaatttttagtagatataagattttgttatgttgttaaggttggtttcgaatttttgagtttaggcgatttttttgttttagttttttaaagtgttaggattataggtatgaattattaaattcggttgagttttttaaaattttaatgaatgtatggatttaaatatattagttgtgttttaattaagtatagttattgaaatttaaattattcgtttttggttagggagaatttttttaagttggttgttttttagtttttttgatataattttaatatatgagttttggtggtttatatttgtaattttagtattttggaaggttgaatggggaagattgattgaggttaggagtttaagattagtttggttaatatggtaagatttttatgtttattaaaaaaataattttaaaaaagtaattatagtagtttgtgatagtttttttgttgtttggtatgaaaagatattttttttttttttttttttttttttttgagatggagtttcgtttttattgtttaggttggagtgtaatggtgtaatttcggtttattgtaatttttgtttttcgggtgtaagtaatttttttgttttagttttttaagta

SEQ ID NO: 427 - DNA, 5931 bp, Artificial Sequence
  chemically treated genomic DNA (Homo sapiens)
  unsure 4905: n is a or g or c or t
taggtttaagaatgggaatttttgggtgaatttggatgatgttattggttttgggaaaatttagtagtagatattattattaagttagtaatgatatattttatttatgtaaaatgtttttttttaataattttttttattttaaaatttagtagtagatagtggttttaaaaatgttagttattaattttttaaaaaaagtatttgtttagtatttgagatatttagttagttattttaatagtgtgtaaggaaagagaaaagttgtttgatattttatagagtgttgtttaaagtttagtttttaaattatcgtattaaaattttttgtataattattaaaaatatagatttttttggagttttttagaaattagaattgttgaattagaatattttttttttttttgtttttttaagatagggtttcgttttgttgtttaggttagagtgtagtcgtgcgattatggtttattatagttttgattttttgggtttaagtgattttttaattttagttttttaggtagttgcgattataggaatatgttattttatttagttaatatttttattttttgagatagggttttgtcgtattgtttaggttggttttaaatttttgggtttaagtgatttgtttatttaagttttttaaattgttaggattataggtatgagttatagtagtcggattttaatttttaattaagttttttatattaaatttaagagaattattgttatagatttatttttttatttattaaataattaatgttaatatgtgtttgaatttaatacgttttttaattggattgttttagaagttattaattattataaattgattgtattttatgtgttataaatcgaggtaaagtattttatatatatttgaattaattttgtaatataatttttaatagttttaaggttcgttttaatttttttttttttttttgagatagggtttcgttttgttgtttagtttggagtgtagtgttgtaattttagtttattgtaatttttgttttttaggtttaagtgattttggtgttttagttttttgagtagttgggattataggtgtgtatgattaaatttggttaatttttgtatttttggtagagatggggttttgttatgttggttaggttgattttaaattttagattttaagtgatatatttgtttcggttttttaaagtgttgggattataggtgtgagttatatttggtaaggtattgtttaatagattattaatagagtgagtaggttgtttaaggttatttagttattgaatagttttatttttgaaatttaggtttgatgttaaaatttgtgattttaattggtatattattttgttttatttaaatttggattatttttatataagtaaatttttttttatataaaggaagtaattaatagaatgtattatgtaatttttaatatgatggttaaaaatattttatattaatttaaaaaattttgtttttttagagtatttttttttgtttttttatgtgtagttttttttttttatttattttttatgattaaatataagtttaggttaggaggagtatacgacgttggtagttttgagttttttttttgtgattaggaagtaaattttataaatatttttttatttattgggtagagaacgtatttagtgtattaagtgttaagtataattttgattttgtaatttttaataggttttgtttaatgttattaaaaagttattataaaaatattaggattaattaagatttgtatgagaattttagtgagaaaaataatattgtttaaattggaatgtgattagatggttaatagttgttttggtatttgttttgataatattaagatttatttgtatttgaattgtagggtttatatattttttaataatgtttgtagggtgttaggagttgatatttataaattatgttgatattagtatattttattgtagaaagttattgtattagttttaagaataggtaaagtagtagtaatattttattaaaggtagttaatgttgttaatttaaggtattaatatatattttatatatataggattaaatgttatttttttttttgtaggatattggagaggggtaagtatgttaagaagtgagatggatttaattagtaatttacggtaaagtgcgtatagttgcgtttgagaaggtttagttatgattagaaaagtgtgaatattgtgatatatttttgtaaaaaaaatgtttagtttaagtttttagattaatttttggtttataagaagaaaaaagaggggtttatttttaaaaagatttttgttttgaattttttaaaatgttaatgttatagggggaaaaaagatgggggaattttattatattaaagttaaagaaaaattttgattggattttgattttttttttttttttttttttttgtaggattgggaaggagaaggtataaaagatatttttgggtaaattaggaaaattagtatttggtttagattttaaaagttataaaatagttgaaataatgatattgtgttttgttggagaattttaaaatttttaggaaatttatgttggaaattttaagggtgttttgtttaataataagtgtttgtaattttttatgataatgaaaaagtggggaggaatgaaaaaaaatggtaaaatgttaattgttgtatatagatgatgggtatatgaatatttattaaattattttttttagtttttaaatatatgaatatttttataataaaatattggggaaaaaaattatgttagaaagattttataggggaaacgtaaaataaagattgagtagtaggcgtttagttgaatttttgataaattgaaggtttttaaaatttggttggaagtgttttgggtatttaagagatattcgatatatttaaatttttagtaagtatttattaaaataatattatgtgtatggtgaaaatgacgggaagacgaatttgatataaattattttatttaggtgtagatatggtagtgaagttaaaaatataagcgttattatatatatataatatattgattgttataaaagatgtataaaaaatgttaaatttagaggaaattattttttgttgggaagaatttggaaatatatttttacgggtaatagaattagatatagaattataaaaggtgattgttataatagattttagtaattaatagtaaagaaataagagtagtttattttggttggcgtgtaagtattaaggaagtagaaattaagtcgagaaggtaggtttgtatttgtattgttgattggttggatattaattatttttaattttatttgaaagttttggtttttttgttgtagttttaagtatttaattcggtattattaagatgatttagagtttttgatttaagtatatagaagaaattataagataatgtatgataattttgtaaagggttatataaaagtaatatagtatttttaaaaatttttaatacgttgtttaagaaattgtagatttgtaggaattttattattagaatcgtagttaaagtttataaagatttaaaggagagacgcggaaaggggggaaaaattagaatgggaaggtaggtggtaggggaaaaagattgaggttttgttttggtggtaggggtttattttttttttttataggtgaaggtggaaaatgattttttgaagttttcgaatttttttttttttaaaggttaaggagtgaaagtatttaataggaatttgcggaggcgtggttaagagtttcgttttgtcggagttaggagtttcgtttcgaggttttcgtttatttttcgttggggttttttcggtcgggttgtttttggttgggttagggcggtttgtagagcggttttattttatagggagttttacgggggcgggtcgtcgttaggttagttcggaaaaaaatcgttttttaacggaagcggttttgagtttcgttcgttattttagcgttttgttttatagggatcgttcggttcgggttcggtttattggttggggtttacggatttattttattttgtaattaaggttaaaaataagtattttttggggtacgggcggttaggttattaatattttttcgttatgatttaattcggaagtgttaaatgtaattttcgggtaggagagggaatttcggagttttaaattgttgtttattttcgtaagtgattagacgttttagtaaaataagggttaggaaattggacgtgtaattcggagtatgaattaatttgtttaatatgggatgtgtggttatttacggtatttttttgggtttatttatagatgtatttttttttagacggtttagttgttgtttcgggtaacggtgagattggcgaaggaaaaaaatttacgttattttggaaataggaagttaggaatttttttttgttattattagttatggtcgttttagttttaatagtaattttcgatcggggagttgttattttattttgttggaggtttattttgtagttcggttagttagaggcgtttagtgggcgggagacggcgtagaggaattgaggaaaggataagggcggagagagagaagttggcggtattgttcgtttttgattgggtagttttttttgtttcggtttcgtttattttttttgtttagcgagtgacgggtttacggtagaagggtggggcggggaggttggagcgagagtagtggcggggcgggcggggcggggcgagtgggggaggggtcggttgggggcgtatgataaaaaatttttttttttaagaggtagaagaaaaataagaagaaaggcgagttaagaagaattacgaattcgagttcggtattcgggnggatggcggagtcggggtttttgacggtaattcggggtcgatgaggcggagggtgtttgttggtcggttttttttgtttgtttttttgttcgtcgggtagtcgggttggttgtcggtagggggaggtttcgtgcgttttgataggcgcgagtcggtagcgtcggggcgaggttcgaggggtcggggttttgggaggcgtcgtcgtcgtcgtttttttggttgttgttttcgggagtgcggggtttttggagtcggttcgcgtgggagtttgtagttcggcgcggagaggaaggcggtcgggtgtgatagcggtcggggtcgggtttgcggcggcggcggcgggcggttcggatagcgtttgggcgacggcgagtcggcgcgagggcgcgggtcgggggttttcggcggatagttttttttttttcggttttttgggttttcgggtttagttcgtagggcgtttcgagtcgtgtaaatcgttggcgagggttcgggcgtagcggcggttatatagggtggggttttttttcgttttttttttggagtttattttgttttttcgtttttttttttttaaaaatttttgagtgaagagtgttggatcggttttgggtgtgttgtttagcgaagcgagttgtagtttttcgagatcgtttcgtagaaatatgttcgatggtaattttttttcgtgatagtatagtttttagggagagaggaaaagtagttttattttttttcgatttttttaggtttataatataagaggttttggggtaagacgattttttttttagtattttaatatttattgtttttgtattatttttttttttttatgtttaggtggaagagtaatgattttaaagtattaatttgtttttttttttatttttttttttttttttttttttttttttttttttttttaagtaggtagtttgtgttattgtggaattatggatttataaataggtggaataaatatcgattcgggagttagaaagaagatgttttgtgtgtgtgttt

SEQ ID NO: 428 - DNA, 5931 bp, Artificial Sequence
  chemically treated genomic DNA (Homo sapiens)
  unsure 1027: n is a or g or c or t
aaatatatatataaagtattttttttttagttttcgaatcggtatttattttatttgtttgtaaatttataattttataataatataaattgtttgtttaaagaaaggaaggaagaaaagaaaaagaaagaaaagaaataaagagaaaggtaagttaatgttttggagttattatttttttatttaggtatggggggagggggatggtataaaaataatggatattgaggtgttgggggaaaaatcgttttgttttaaagttttttgtgttatgagtttggggaagtcggggaagagtgagattattttttttttttttttaaaagttgtgttattacggggagaggttgttatcgggtatgtttttacgaggcggtttcgaagggttataattcgtttcgttaggtaatatatttagagtcgatttagtattttttatttaagggtttttagggagaggagaacgggagagtaaggtggattttagggagggggcgagaagagattttattttgtatgatcgtcgttgcgttcgggttttcgttaacgatttatacgattcggggcgttttgcggattgggttcgggggtttagggagtcgagaggagagagattgttcgtcgggggttttcggttcgcgttttcgcgtcggttcgtcgtcgtttaggcgttgttcgggtcgttcgtcgtcgtcgtcgtaggttcggtttcggtcgttgttatattcgatcgttttttttttcgcgtcgggttgtaggtttttacgcgagtcggttttaagggtttcgtattttcggagatagtaattaggaaagcggcggcggcggcgttttttagggtttcggtttttcgggtttcgtttcggcgttgtcggttcgcgtttgttagggcgtacggggtttttttttatcgatagttagttcgattgttcgacggataggaaggtaggtaggaagaatcgattaatagatatttttcgttttatcggtttcgagttatcgttaggagtttcgatttcgttatttnttcgggtatcgagttcgaattcgtaattttttttggttcgtttttttttttattttttttttgttttttaaaaagaaaagttttttattatacgtttttagtcggttttttttttattcgtttcgtttcgttcgtttcgttattattttcgttttagttttttcgttttatttttttgtcgtgggttcgttattcgttaggtaagaaaaatgggcggaatcggggtaagagaagttgtttaattagagacgggtagtgtcgttagttttttttttttcgtttttgttttttttttagtttttttacgtcgtttttcgtttattgggcgtttttggttagtcgggttatagagtaagtttttagtagggtagagtgataatttttcgatcggaagttattgttgaagttaaggcggttataattgataatggtaaaaggagatttttggttttttgtttttagggtgacgtagatttttttttttcgttagttttatcgttattcggggtaatagttgagtcgtttgggaagggatgtatttgtaagtaagtttaaagaggtatcgtgggtgattatatattttatgttagataagttaatttatatttcggattatacgtttagttttttggtttttattttattgagacgtttggttatttacggagatggataatagtttagggtttcgaaatttttttttttgttcggaagttgtatttggtattttcgaattgggttatggcggaagggtgttaatagtttggtcgttcgtgttttagggaatgtttatttttgattttagttgtaaagtgaggtgagttcgtggattttaattagtgggtcggattcgggtcggacggtttttgtgggatagagcgttgaaatggcgagcggggtttagggtcgttttcgttggaaggcggttttttttcgggttggtttggcggcggttcgttttcgtgaggttttttgtggggtgaggtcgttttataggtcgttttaatttagttagaggtagttcggtcgggaggattttagcggggaatgggcggggatttcggggcggagtttttaatttcggtaaaacggagtttttgattacgttttcgtaagtttttattaagtatttttattttttggtttttggagggaggagaattcgggaattttagaaaattattttttatttttatttataaaaggaaaagatgagtttttattattagggtaggattttaattttttttttttgttatttgtttttttattttgatttttttttttttttcgcgttttttttttgagtttttgtaagttttgattgcggttttggtggtgggatttttgtaggtttatagttttttaaataacgtgttgaagatttttgaaaatattgtattgtttttatatggttttttataaagttattatatattattttgtagttttttttgtatgtttgagttaagaattttaagttattttggtaatatcgggttggatgtttaaagttgtagtaaaaagattagaatttttaggtaaaattgaaaatggttaatatttagttagttaataatatagatgtaaatttattttttcgatttaatttttgtttttttagtatttatacgttagttaaaatgaattatttttgtttttttgttgttaattattgaaatttgttgtagtagttattttttgtgattttgtatttgattttgttattcgtggagatgtgtttttagattttttttagtaggaagtaattttttttgagtttagtattttttgtatattttttatgataattagtatgttatatatatataatagcgtttatgtttttagttttattattatgtttgtatttaaatagaatggtttgtattagattcgttttttcgttatttttattatgtatatgatattattttggtaaatatttattgaaagtttgaatatatcgggtgttttttggatgtttaagatatttttagttaagttttagagatttttaatttattagaaatttagttgagcgtttgttatttaatttttgttttacgttttttttgtgaagtttttttgatatgatttttttttttagtgttttattatgaaagtgtttatatatttaaaagttgaaagaaataatttaatgaatatttatgtatttattatttatatgtagtagttaatattttgttatttttttttatttttttttatttttttattgttataaaaagttgtagatatttattgttaggtaagatatttttaagatttttagtatgaattttttaagaattttgaagttttttagtaaaatataatattattattttagttgttttgtaatttttaaaatttaggttaagtgttaatttttttaatttatttaggaatattttttatatttttttttttttaattttgtaaaaaaaaaaaaaaaaaaaaaaaattaggatttagttaaaatttttttttagttttaatgtagtagagtttttttattttttttttttttgtgatattggtattttgaagagtttaaggtaggagtttttttggaaatgggttttttttttttttttttgtaaattagaagttagtttagaggtttaagttgaatattttttttgtaaggatatgttatagtatttatatttttttagttatgattaagtttttttaaacgtagttatacgtattttgtcgtgagttgttggttaaatttattttattttttagtatgtttatttttttttagtgttttataaagaagagggtagtatttaattttgtgtgtatagagtatgtgttagtgttttgggttggtaatattgattatttttaataaagtgttgttgttattttgtttatttttggagttgatgtaatgattttttgtagtaaagtgtattgatgttagtatagtttatgagtgttaatttttggtattttgtagatattgttgaaagatgtgtgggttttgtaatttaaatatagatgaattttgatgttattaaagtaaatattaaggtaattgttggttatttggttatattttaatttaggtaatgttattttttttattgaaatttttatgtaagttttaattggttttggtgtttttatgatagttttttggtagtattaagtagagtttattaaaaattgtaaaattaagattatatttaatatttagtatattagatacgttttttgtttaatggatagagaagtgtttgtggaatttattttttaattataaagggaaaatttaagattgttaacgtcgtatattttttttagtttagatttatatttgattatgaaagataagtgaaaggaaaaaattgtatataagggagtagaagaaaatgttttgggaggatagaattttttagattggtatagaatgtttttagttattatattgaaaattatatagtgtattttgttagttgttttttttgtgtagaagggaatttgtttgtgtggaaataatttagatttaagtaaggtaaaataatatattaattaagattataggttttagtattagatttgggttttaggaataagattatttaataattggatgattttggatagtttatttattttattaataatttattaaatagtgttttgttaggtgtggtttatatttataattttagtattttgggaggtcgaggtaggtgtattatttgaagtttggagtttgagattagtttggttaatatggtaaaattttatttttattaaaaatgtagaaattggttaggtttggttatgtatatttgtagttttagttatttaagaggttgaggtattagaattatttgagtttgggagatagaggttgtagtgagttgagattgtagtattgtattttagattgggtaatagagcgagattttgttttaaaaaagaaaaaaaaaattaaaacgagttttaaaattgttaaggattgtgttatagaattaatttaaatatatataaagtgttttatttcggtttatagtatatggagtgtagttagtttatggtagttaataatttttaaagtaatttagttaggggacgtattgaatttaggtatatattgatattgattatttagtgagtgaaggaatgaatttatgatagtagtttttttaagtttaatgtgggggatttaattaaaagttagggttcggttgttgtggtttatgtttgtaattttaataatttgggaggtttgggtgggtagattatttgagtttaggagtttgagattagtttgggtaatacggtaaaattttgttttaaaaaataaaaatattagttgggtggggtagtatgtttttgtagtcgtagttatttgggaggttaaggttggaagattatttgagtttagaaggttaaggttgtggtgagttatgatcgtacgattgtattttagtttgagtaatagagcgagattttgttttaaaaaaataaaaaaagaaaaagtattttgatttagtaattttgatttttgaagaattttagaaaaatttgtatttttaataattgtatagggagttttgatgcgatgatttggggattgggttttaagtagtattttgtaaagtattaaataatttttttttttttttgtatattgttgaaatagttaattaaatattttaggtgttgagtaaatattttttttaaaaggttaatagttaatatttttaggattattgtttattattgaattttgaaataggaagggttattagaaaaagatattttgtatgagtaggatgtattattattaatttaatagtagtgtttgttattggatttttttagagttagtggtattatttaagtttatttaagaatttttatttttaggttta

SEQ ID NO: 429 - DNA, 14615 bp, Artificial Sequence
  chemically treated genomic DNA (Homo sapiens)
ggttttttttgaggtttttttttttggtttatatatggttgttttttggttgtttttttttatggttatttttgtgtgtatgagtgtggtgttagggtttttttttttttttataaagttattagttatattagggtagggttttattttgatggttttattttaatataattatttgtttaaagattttatttttaagtatggttatattttgaggtattgggagttaggattttaaatacgaattttgtggggatataaaattaatttataattttttttttttatgattgaataatattttattatttgtatatattatattttgtttatttatttattaatggatatttggtttgtttttattttttggttattatgaataatggttttgtaaatatttatatataagtatttggttatttgtttttagttttttggggtatatatttacgaataggatttttgggttatatgataattttatgtttaattttttgaggaattgttaaattgttttttatagtagagtattattttatattttaagttatgtatgagggtttttatttttttatatttatattaatttaattttttagttttagaaagtgtttttttttttattgaatttttttattttaatgtattaaaattttttgtttttaattttttgtattttttttaataattagttttttttaaagttatgtttagttaggtatagtggtttatgtttgtaattttagaattttgggaggtcgaggtgggtggattatttgaggttaggagttttagataagtttggttaatatggtgaaattttatttttattaaaaatataaaaattagtagggcgtggtggtacgtatttgtaattttagttatttaggaggttgaggtaagagaattatttgaatttgggaggcggaggttgtagtgagttaagattatattatcgtattttagtatgggtaatagagtaagatttcgttttaaaaataaaaaaataaaaaataaaaaattatttttatagttattataaattatataatttattgtgtgttatattaggttttttaatttttagttttttgatataggaataataatattttttagaattgttttaagaatcggttaggagtggtggtttatgtttgtaattttagtatttcgggaggttaaggtaagaggattattttagtttaggagtttaagattagtttgagtaatatagcgagattttttttttattaaaaatttaaaaattagttaggtttggtggtacgtttttttagttttagttatttaggaggttaaggtgggaggattatttgagtttatgagttttaggttgtagtgagttgttatttagtttgggtgatagagggagatattattatgaaaataaagtaaaataaaaaatagaatttaatgagtttatgtatttgaaatgtttaaatacgtagtaagtatttaataaacggtagttatgatggttattgaatttttgtttttagtttttatttttttttataaattttagattgtttattggttatttttaaatagtatttatatagtttgtttatttgtaaatatttattgagtgtttattatatgttagttattatgttaggtattggtttataatagtgaatataatttttgtttttttgggaggaaaaaaaaaatagataggtaaataaatgtgtatttatagttttatagtttttgatcgttgttgtgttttataaataatttaattgtgatatgtataatataaaattaattttattattttttttttaaattagatttttaggtatcgttttttatttagttaattaattaaaaaacggaagttattttagattttttgatttttattgagatgtttgttttttattttgttttgtttttatttggtattgttaatatcggtattaaaatttaagaattaaattttggaaataagagaaattggattagagttggaataaagaaagaaaaagtttttgagatttgaaattagattgaaggtattaatatatttaaagattgtgttagtcgggcgtagtggtttacgtttgtaattttagaattttgagaggtcgaggtaggcggattatttgaggttaggaattagagattagtttggttaatatggtaaaatttcgttttttaataaaaaatataaaaaaataaaaataaaaattagtcgggtgtggtggtaggcgtttgtaattttagttattcgggaggttgaggttagagaatcgtttgaatttgggagttagaggttgtagtgagtcgagattgcgttattgtattttaatttgggttatagagtgatattgtgtttaaaaataaaaaaataaaaaataataataataataattagttgggtgtggtggtacgcgtttgtagttttagttattcgggaggttgaggtaggagaattgttgtttgaattcgggagggggatgttgtagtgagtcgagattatgttattgtattttagtttgggcgatagagtgagatttcgttttaaaaaataaaaataaaaataaaaaaaatttttggatttgaattttttttgtattttttaatttatttttttattttgtttttgttgaattttatatttgattatgtcgaattatttggtttttttcgaggtattttgaagattgttttttttgtatagaaggttttgttttattttatagtttattttattaatgtttggttattttgtgaggttgagattaagtgttatttattttaaggaattttttttgatatttgggtagatttgatttttttcggtcgggcgcgatggtttacgtttgtgattttagtattttgggaggttaatgcgggcggattacgaggttaggagttcgaaattagtttggttaatatggtgaaatatcgtttttattaaaaatataaaaattagtcgggtgtagtggtacgcgtttatagttttatttattcggaaggttgaggtagaagaatcgtttgaatttacgaggtggaggttgtagtgagttttgattatgttattgtattttagtttggcgatagagcgagattttattttaaaagaaaagaaaagaaaagaaaagaaaagaaaagaaaagaaaagaaaaaagttaaaaaaaaaaagatttgattttttttttttatatttaaaataaaataaaaagaatatttagatttttagttttattttcgattttttgtttttttttgatatattttttaaatagttttttattggtatatttttgttatatattgtattttagttttagtttttttttttggtttggttttttttttttaatttttttttttttttttttttttgagacggagttttattttgttgtttaggttggagtgtagtggtatgattttggttaattgtaatttcggtttttcgaggttaagtgatttttttgttttagttttttgagtagttgggattataagtgcgtgttattatattcggttgttttttgtatttttagtagagatggggttttatcgtgttggttaggttggttttaaatttttgattttaggtgatttatttattttggttttttaaagtgttgggattataggtatgatttattacgtttagtttttttttatttttttttagttagaattgagaagtttatttttattaatagttatatttattttttttaaattatttatcgtttaattataattttttgaatattaggaaggaatataatttttatatatatttatatatataggtaatatttgttaagtatatatttgtattttattatatggttatagtttgttttattgtagtaggggtatttggaggatttagaatatgtttttatttggaatggaaaggaggtaaagattgtgtgttaatggaaattattaagattagtaatttagggtttttaagtatggatagttagagatattgattcggaattgagatttagggaaaatagttatttagtatttatttttagaatgtttgaatatataatatatagatagtgtatagtttatagttaaaatataatgtatagttagtttagtttttaaatcgattgtttgggtttattttttattagttttgttatttgttatttgtgtgattttaattaaattattttatttttttgtgttttagttttaatattagtaaaatagagataatgatagaatttagtttttacggtaattttgaggattaaaaagttaatgaaagatttgaatagtgtattgatatattaagtgaaatgtaatgtttagttattttttatttggttattttattagaatttttataaaatatagaaataaaagttttattatgtagttttatttttgtttattgttacgtaatatattttatatatttttcgtattttacgtttcgttttttaataataattattataaatttcgatcgttttttttaggttttttttttttataaatttgtcgttttttgttttttaagttattttagtttagaattgttttaggaaataatgaatgaatagagagagtttagtttgtttatttatttataatttattagtttaatttagtttagatttagcggtaatttttggggtgttaaggaggaaagaaggagatggtagtgcggggatagggtagagtttgggttaaaggaagttatatttagtttttgttttgttttgttcgatataggtaacgtgattttaagcgatagttagttgatgtttgttttttcgagttcggcggttagtagtcggaagtagttcgttcgggggcggggaaaggtgttttaaggaggagttaggggcgtgcggttaattgtaagcgattgttttagcgaagagggcggaagaggagagatttagtttcggacgcggtcgtcgtcgtcgtcgttatttgttatttttatttcggtattagtagttagtcgttcgtgtttcgtttgttttttcggcggagtttgttgttcgttttgttatttttttgttttgtttttgtttttgtttttattttcgaatggatttggtaggagtggtatcgtttgagttcgggacggtagcggtttggggatttagtaaggtaagtggtagacgagattggagtattagttttggttatacgggttggatttttcggaaagttcggagagggcggtttcgtgggcgattcgggaagttttggggcgggatttcgcggatttcggtaagggggtattggtcgcgggggtgtcgggatggggatggagggagcggaaagaggggcggagggcggttggattttttaaaggttattttgagtggttagggttttttatttttttagcgtattttttgtattatcgtagtatgtatttgagtaggattggtttatatattttgatgatattggaggggaaataagtacgattttgttttttattggttaagtgagttagtcgaatatatagttagttagatagaaagttggtttaggaagttgtttatttaatttgataagtgtggttattttagtttggaaatgttttgtttttgaagtagtaaaagataaaatttaggcgtatttttttttttcgacgttgaaatttaagtgcgtattacggattgtaaagtgtttatgaattttattatttgtttaagttttgacgtttaaatttttttatagagtggtaaattaaagatttttattttatatttgttttttggtttttaggtaggttttttttatgatattttgattatatggatgaaaatatttttttgttattttatggagggtttgtttgagagtagagtgtttttattgggattttttgttttataaattaaggtcgtaaaggagtttagtttttttagttttatagttgttttttatatgttaatatagaatatttgtttttatttaaaaggttttattagatttttaggttaggttttaataggaaaaggggttaataattagttattaagtaattaaaagttaattttgtaaaagttttcgtatagttgttggaagaatttgagatattgcgttggtaaatgtggttaagtttgtatgttattttgtgtatttttttttgagattttgtttataaggttaagattagtagatataaaaggatgaaattagtagatagattagtattatgaatatatattttgtatgttaaagttttttagttaagtattggtagaggttggtaaaaatgttaaatgagatagattttatttagaatatattttaattttagaataaattttatttataaattaatttagtaataaattatttaatagttatatttttatttaagtgtatattattagaattataaaattttatttttattgtgtaataaaaatgtttttgggatttatagacgttttattgggaggatagtgttttgaaaggtaaaataattagaaataggttgaaagtattattattaattttttttttttttaattttttggaaaattaaagtgattatagaagtttatatggaggaggtgaagatttgaggagggttttgaaaaatggaaggatttttaaaattttttagttaggatttttttttttttttttttttttttttttttttttttttttttttttttttttttttttttttttttttttttttttttttttttatttatttatttatttgagacggagtttcgttttatcgtttaggttggagtatagtggtttgtttttagtttattgcgatttttgtttttcgggtttaggtaatttttgtgatttagttttttgagtagttgggattataggcgtttgttattacgtttagttgattttcgtatttttttttgtagagatgggattttatcgtattggttaggttggttttaaatttcgattttaagtgtttattcgtttcggttttttatattgttgggattataggcgtgagttattatgtttaacgttttttttttttttttttttttttttttttttttttttgagacggagtttcgttttgttgtttaggttgtagtgtagtggcgcgatttcggtttattgtaagtttcgttttttgggtttaagcgatttttttgttttagtttttcgagtagtgggattataggtgtttattattatattcggttaattttttgtatttttagtagaggcggggttttatcgtgttagttaagatggtttcgattttttgatttcgtgattcgtttattttggttttttttttttttaattgagatagggttttattttgttatttaggttggagtgtagtggtatgattatattttatattgtgttttgattttgtaggtttttatttcggttttttgattagttggattataggttagtgttattatatttagttaatttttgggttttttttgagacggagtttcgttttgttattaggttggagagtagtggtatgattttagtttattgtaattttcgttttttgggtttaagtaattttttttttttagttttttaagtagttgggattataggtgtatgttattatgtttagttaatttttatatttttagtagagatggggttttattatgttggttaggatggtttcgattttttgatattgtgatttttttattttggttttttaaagtgttgggattataggtgtgagttatcgcgtttagttaatttttgtatttttgtgtagagatcggattttattatgttgtttaggttggttttgaatttttgggtttaagtagtattttattttttttcgttttggttttttaaaatgttaggattataggcgtgagttattacgtttagttcggatttttttatatttttaaaaattgaggattttaaatgttttttgtttatattgattatattaattgatatttattaatttgaagttaaaattgagaaatagaaaaattttaagttatttaaaagttatgttagtttgatggtagtgggttattagaatttattaatattagtgttattaaagttgatatataattttttcgttgttaaatttggttggttttaaaaaaaaaagttatatgttaatataaataatatttttatatttaaagaaaatttaaaaaaatagattagaatatgtgagaaaagtggaaaaagaaaataaataaaaaaatagagttgagattttattgtgttgtttagttggtttggaacgtgtggttttaagtagtttttttattatggttttttaaagtgttagaattataggtgtgaattattatatttggttaaaagaaaattatatttgaaaataaaaattagtgaatagtattttatatttttgtaaatttttaatatttgatttattagaagatatttggatttttttatttttttttttttatttaatttgttgtaaggttgaagtatttgaagaaaatttatttttatagttaagtagattgtagtagatataagtgaaggtgggtaataagagcgtagtagaaatattgagaataaattgggttaaatatttaaaaatgtatttatattttaaatttattttttagaaaattttagaaaatacgagaatattaagtatatattttattggttattagtgatgatgttattatatttgatgtagattttggaaaattttatatttttgggagaatgagagttaaaaagataaataatgtaatattattattatgaaaattttgattttatagattttttgaatgggtgttggggattttttttttagagtattagggtgtaagttataaaatgttgaattattattatggataaagaattttaggggatattttaagaagagaggattggtaaattgtaagtaaaagtgaggaagtgtgtagttttgttgatagagagttgtaaaaaaaataaataaatagcggtattttttaaaattgttaaagttattaaaaataaggaaagtttgagaaatttaatagtttaagaggagtttaaggagacgtggtaattaaatgtaacgtggtattttgaatgggattttggaatagaaaaaggatgttagagaaaaattaaggaaattagagtagagtatggattttagttaataataattatgtattaatattggttcgtgaattgtgataaacgtataatattaatgtaaggtattaataggataaattatcgagtgtagtatttgggaattgtattgttttggtagtttttttttagttttttaaaagtaagattattttaaaattaaaaaaattttaaaaaatggattagtgttgttatgtagttttagattattttttttagagttatttgttttgagttgaaaaattatttatttaaatattttgtttagattatgttttttagttgtatggttagaaaggggatttttttgtaggttatgttttttttgattcgtttttagtagaggattgaatttttgttgttgtgtgttttttttatgtttgttggtttttttttttttttttggagatagagttttattttatcgtttaggttggagtgtagtggtgtaattttggtttattgtaatttttatttttgggtttaagtaatttttgtgttttagtttttagagtggttgagattataagtgtgtattattacgtttggttagttgttttttttttttttgtattttagtggaaatggggttttattgtgttgtttaggttggtgtcgaatttttgagtttaagtaattcgtttgttttagttttttaaagtgttagtattataggcgagagttattgttttcggttgttgtttttaattttatttgattttttatttataattgtttgtaggaaatttttaaaaaaaatgatataagtagcgaaggttatatttttaggaagtggaaggaaagggagatgattttttattaatgtgtagttaggtaggtgggggagaatgcggtagtagtgaagaattttaaggaatagagtttagtggtggtagttttgtaaaggagaggaaaatagggtgggttttagggttatttagtaataggaaagaaagaattaggaggttggttaaaagtttgatggatgttttttgaagtagaatcgttgattggaaaggattgtatggggtgttttattagattgtgatattatagggagtttgtgttgatgaatggaatagtaggaaatgattttggatagttaggatagagtaagattatggagggcgttttttttattttgttagattttttataaaaagcggtttattgaagagttatagatgatagaggatttttttatatataatttatggtatttgtttataggaggagtttgtagtaaattttttgagtatttgggatagtaaattattgtgtttatagggaaaacgtagcgggttttttttcgattttagaagttgttcgttttatagtttggaaaaagtgtatggagggtttttaattgttggtttgaagagtttgggtttgattttaaagtatgggagtggtagtttttttgaaatttttatttatttattttatttaaggaagttgttttagtgtgaagtggattagttgagttgttatagggtagtatagtttttagagtttagggttagtaggagtggatagtaagggtgttttggtgttgtttgaggtttttatttgttttattttttgatttagtgtatttgtgagtagattaatttttgttttaaaataataaaatttttgtttgttatttttgttttttttgataaattgttagttaatattttaatattttagtagaattaattgatagatggtaaaggagttgaaattttagaagcgggtaggtaaaagggtaattttttaagatggggaaaaggatattagattagtagggatgtagaaaggcgttagatttttgtagttaattattttagtgtttttttttggtatatattgtttaggaaatattggaatgtttttttatatttaaagttttatgttgggttttgagggttgatgagaagtttttattttttaaggggtttatgttttattgtggttaatgtatgaattttaatatagtgatgagttttgtattaatagtgtttgtatattgttatgggaatataaaggaaagggtttaattttggtaatattgagatagttttatagaggagatggtatttaattggtgtaaataaagaaggaagaaaaattaatggtagagaaaggaatgtgtgaaggtatgtagcggggaaagtatgttattttttttgtttggttttgagatagtttcgttttgttattcgggttggagtgaagtggcgtaattttggtttattgtaattttcgttttttgggtttaagcgatttttttgttttagttttttgagtagttggaattatgggtatttgttattatgtttgtagtgtaaattagtataaaaaatattaatttttatatttttagtagagatggggtttttttatgttgattagattggtttcgaatttttgattttaggtgattcgtttgtttcggttttttaaagtgttgggattataggcgtgagttattgtatacggtttgagtatgttatttttggtatataattagtgttattagagtgtaggatagatgagggttgagattggaaagataaattagggtaagttgtaaagggtattttttgttgaggaatttggattttatttatttagagttagggttttattttgttatttaggttggagtgtagtggtataattatagggtttaaatgatttattttttattttagttttttgagtagttgggattgtaggtatttgttattgtgtttagttagttttttaatttttttgtagagatgatattttgttgtgttgtttagggtggggaatttggattttatattgtagttagtagggtagtttgttttatatatttcggggtgagatgatagggaagttgtatagtaaaatgttaagagtgtagtttggtattgttttggtttagagtttggtatttttatttatgatgtttttttgggttaaaagaaaagtttttgtgtattttagttttaaaatttataaaatggggatggattgtaattatttaattgttgtgtgatttaagtaatttatgtaagttatgtatatttaattaagtgatttaaatatagtgaatatttagatattgtttgttatgtaattgttagttattgttaaatgtgagtgagaattttgagttagatagttatttgttttttggaatttggattttgaaattgattagatgaaatatttttaggttaaatagtattgtattttttatttagaggatatagaaggaagttaggagagttatgaggttaaaaaattagttatgttttttagatgatagaaagttttaagagtttagattttaaaatttttattaggagagttttttatttaattatagataagttttgagtgaatgaaagatatattagatttttaggaagttttttttttttttttaagtttggttttatagaaggttggaagagttttgtgatagtgtattgtaggtatgtgttaggtattaggtgtatttttttaattttagggtgagattagataaaatttgatttttatttatttaggtataaatatagttattatttgtcgtttttaggtgttttatttaaatagtttgagttaagtaaatttttgaatgttagtattgtggaatttgaataaaggttatttgtttagttgtttttgagtgttatgtagtaggtttttagattaattagagggtttatattggttgaatttgattaaataattttgtggttaaaatagataatattttatgttatattttaaattagatatttagtagtagttaaggaatgagttttggattttattttaaaagtaatgggaaataataaaaaagattttgagtaaggagatggaatttattatatttgtattttagaataattattgtgttatagtgtgaagaatggaaattattaagattgagagtagaaagattcgttaggatgttttgaaagtaatttagcgaatgggatattttggagtagaattatggaagagggatggaaagagttgggtaagtttaggagatgtttaggtattttattaaatagtaaaggttttaattaataggttataaaatataattatttgttgttgttaagtaaagtattttgtttttttagaaattatgaatttgaaataaatttatagtttgattttaagaaggttgaggtaggagtatgttattgaggaaggttaattgggtttgatagaatattattgtgtgtattggtattgttttaagagtttgttttttagtttttaaagtttagaaataaaattttggggttaggtttggtggtttatatttgtaattttagtattttgggaggttgaggtgggtagattatttgaggttaggagttcgagattagtttagataatttggtaaaattttatttttattaaaaatataaaaattagttgggtatggtggtttatgtttataattttagttatttagaatcgaacgacgtaattaaagcgaacgtcggtagttagatagaagtgagttagaggcgcgtataataaaagaataatcgtatttcgtagaatataagaagaaaaaagtaaaattaaatatttataaaatatcgatataacgtatagtttagattttatgattaattaatttttttattgtgattggtagggggtatttattttgttatttaggttggagtgtagtggcgcgatttcgatttttgtaattttaattttttaggtttaagcgatttttttgttttagttttttgagtagttgggattataggtatgtattattatagttcgttaattgtttgtatttttggtagagatggggttttattatgttggttaggttggttttaaatttttgattttaggttatttattcgttttggtttgttaaagtgttaggattataggcgcgcgttatcgcgtttggtttgtttttgtttttgttttagtatattttaagatgttttgagaggggttgatataatttgtatatttagatgatttaatgtttaaattagaatgagatataattttttattaagttttaaatggtgttagttggtatagtttatttttataagaaaatttatttgggaaattagattataagtagaaggtagtttggtgagtaaggattggaataagaggaattatatgaatttattggttagtggggcgatgttagtgggtttgatgtttttttttagttttaaggatatatttatttagtaggttagaaagtgtttttggttgttttagtttatatatatttttgattaaatttgatttgggagataattttatttttgagatgatttttgtaaatagttagttatttatttttggtttttaattatatagtttaatttttaaaatataatattatttgtaaaatgagaggtattttattttattatgatgaattgagttgtttttttttttttttttatagt

SEQ ID NO: 430 - DNA, 14615 bp, Artificial Sequence
  chemically treated genomic DNA (Homo sapiens)
attatgaaaaaagaaaaaagaatagtttaatttattataatgaaataaagtattttttattttataaataatgttatattttgagaattaaattatgtagttaaaaattagaaatgaataattagttatttgtagaaattattttaaaagtaaaattattttttaggttaaatttagttaaggatatatgtaaattaaaatagttaaaagtattttttagtttgttaagtaggtatatttttaaagttgaggggaagtattaggtttattggtatcgttttattagttaatgagtttatgtaattttttttattttaatttttgtttattaagttattttttgtttataatttgattttttaagtagatttttttataggaatagattatgttaattagtattatttgaagtttaatgaaaagttatattttattttaatttaagtattgagttatttaagtgtataaattatgttagttttttttaaaatattttaggatatgttaaaataaaaataagaataggttaggcgcggtggcgcgcgtttgtaattttagtattttggtaggttaaggcgggtggataatttgaggttaggagtttgagattagtttggttaatatggtgaaattttatttttattagaaatataaataattagcgggttgtggtggtgtatgtttgtagttttagttatttaggaggttgaggtaggagaatcgtttgaatttgggaggttagggttgtaggagtcgagatcgcgttattgtattttagtttgggtgatagaatgagtattttttgttaattataataaagaaattgattagttatgggatttagattatgcgttatgtcggtgttttgtgaatatttggttttgtttttttttttttgtgttttgcggagtacggttgtttttttgttgtgcgcgtttttggtttatttttgtttgattgtcggcgttcgttttagttgcgtcgttcggttttgagtagttgggattataggtataagttattatgtttagttaatttttgtatttttagtagagatagggttttgttaagttgtttaggttggtttcgaatttttaattttaggtgatttatttattttagttttttaaagtgttgggattataggtgtgagttattaagtttagttttaaaattttatttttgaattttagaagttgagaaataggtttttaaaataatattaatatatatagtaatattttgttagatttagttgattttttttagtgatatatttttgttttagtttttttgaaattaaattgtaggtttattttaaatttataatttttgagggagtaagatgttttatttagtagtagtaaatgattatattttatagtttattgattaagatttttattatttagtaagatgtttaagtattttttgaatttgtttaattttttttattttttttttataattttattttaaggtattttattcgttgggttatttttagagtattttaacgaatttttttgtttttaattttggtagtttttattttttatattgtaatatagtaattgttttaaaatgtagatgtgatgggttttatttttttatttaaaattttttttattgttttttattgtttttaggataaagtttaaaatttattttttaattattattgagtgtttaatttagaatatagtataaaatgttatttgttttagttataaaattatttgattaagtttagttagtataggttttttagttggtttaaaggtttgttgtatgatatttagagataattgggtaagtgatttttgtttaggttttatagtattgatatttaggaatttatttagtttaggttgtttgggtggagtatttaaaggcgataaatgataattatatttatgtttgagtgaatgagaattaagttttatttagttttattttgagattgaggaaatatatttggtatttagtatatatttataatatattattatagaatttttttagttttttgtaaggttagatttgggagagaagaagaggttttttgaaagtttggtgtgttttttatttatttagagtttatttgtaattgagtggagaatttttttggtaaggattttaaggtttagatttttgaagttttttattatttggagaatatagttaattttttggttttatgatttttttgatttttttttgtattttttaggtagaagatataatgttgtttagtttagaaatgttttatttgattagttttaaagtttaggttttaaaaggtaggtgattgtttaatttagaatttttatttatatttggtaatgattaatagttatataatagataatatttgaatatttattatatttaagttatttggttaaatatatataatttatatagattatttaaattatataataattgagtagttgtaatttatttttattttatggattttaaaattgaggtatataaaggttttttttttaatttaagaaaatattatagatggaagtattaagttttgaattaaggtaatgttaggttgtatttttagtattttgttatatagtttttttattattttatttcgaaatgtgtgaagtaaattgttttattgattgtaatataaaatttaaattttttattttaggtaatatagtaagatattatttttataaaaaaattaaaaaattagttgggtatagtggtaaatgtttgtagttttagttatttaggaggttgaagtaggaggtggattatttgagttttatgattgtgttattgtattttagtttgggtgatagagtgagattttggttttaaataaataaaatttaagttttttagtaaaggatgttttttataatttgttttgatttatttttttaattttaatttttatttattttatattttagtaatattaattatatgttaaagatggtatatttaggtcgtgtgtagtggtttacgtttgtaattttagtattttgagaggtcgaggtaggcgaattatttgaggttaggagttcgagattagtttggttaatatggagaaattttatttttattaaaaatataaaaattagtattttttatattaatttatattataggtatggtggtaggtgtttatagttttagttatttagaaggttgaggtagaagaatcgtttgaatttaggaggcggaggttgtagtgagttaagattgcgttattttattttagttcgggtgatagagcgagattgttttaaaattaaataaaaaagatggtatatttttttcgttgtatgtttttatatatttttttttttattattggttttttttttttttttatttatattaattaaatgttattttttttataaggttgttttaatgttattaaagttggatttttttttttgtgtttttatagtagtatgtaaatattgttaatgtagaatttattattgtattagggtttatgtattagttataatggagtatgaattttttgaagggtagagattttttattaatttttagagtttagtatagagttttggatataaagaggtattttagtattttttgagtagtatgtgttaaaagaaaatattggagtgattggttgtagaggtttgacgtttttttatatttttgttaatttaatgtttttttttttattttggaaagttgtttttttgtttgttcgtttttgaggttttaatttttttgttatttgttaattaattttgttaaggtattaaagtattagttgataatttgttagaagaggtaaaaatgataggtaggaattttgttattttgaggtagagattgatttatttatagatatattgaattagaaagtgaaataagtagagattttaaatagtattaaagtatttttgttgtttatttttattgattttagattttagagattatattattttgtaatagtttaattggtttattttatattgaggtaatttttttgggtgaggtaaataagtaaagattttagaaaggttgttatttttatattttgaaattaaatttaaattttttaagttaataattaaaagttttttatatattttttttaggttgtgagacggatagtttttggggtcgggggaagattcgttgcgttttttttataggtatagtggtttgttattttaagtgtttagaaaatttattgtaggttttttttatgaataggtattataggttgtatataagggaattttttgttatttgtgattttttagtaaatcgttttttgtaaaaaatttaataagatgggggaaacgttttttataattttgttttgttttagttatttaaagttattttttattattttatttattaatataaattttttatagtgttataatttgatgggatattttatataattttttttagttagcgattttattttaaaggatatttattaagtttttaattagttttttggtttttttttttttgttgttaaataattttaagatttattttgttttttttttttttgtaaaattgttattattgaattttgttttttggggttttttattattatcgtatttttttttatttgtttggttgtatattagtggggaattatttttttttttttttattttttaaagatatgattttcgttgtttgtattattttttttaaaggttttttgtagataattatgggtaaagaattaagtaaaattaaaaatagtagtcgggggtagtggttttcgtttgtaatattagtattttgggaggttgaggtaggcggattgtttgagtttaggagttcgatattagtttgggtaatatagtgaaattttatttttattaaaatataaaaaaaaaaaaaataattagttaggcgtggtgatgtatatttgtagttttagttattttggagattgaagtataagaattgtttgagtttaggggtggaggttgtagtgagttaagattgtattattgtattttagtttgggcgatagagtgagattttgtttttaaaaaaaaaaaagaaaattagtaaatatgaaagaggtatatagtaataaaaatttagttttttattggaagcgagttaagagaaatataatttataggaaggttttttttttaattatatagttagaagatataatttaagtagaatatttaagtaagtaattttttaatttaagataagtggttttgaaaaaaataatttgggattatataataatattaatttattttttaaaatttttttggttttagaatagttttatttttaaaaaattagaaaaaaattgttaagatagtatagtttttaaatattatattcggtagtttattttattaatattttgtattagtattatacgtttgttataatttacgaattaatattgatatataattattattaattaaagtttatattttattttgatttttttagtttttttttaatattttttttttgttttaggattttatttaaaatattacgttatatttagttgttacgtttttttaagttttttttaggttgttgagttttttagattttttttgtttttgataattttgatagttttgaggagtatcgttatttatttattttttttataattttttattaatagagttatatatttttttatttttgtttatagtttgttaattttttttttttggaatattttttaaaattttttgtttataatagtagtttagtattttgtaatttgtattttggtattttaggagaaggatttttaatatttatttagagggtttatgaagttaaaatttttataatagtaatattatattatttgtttttttaatttttatttttttaagagtgtggagttttttagagtttatattagatgtgatgatattattattgatggttaatggaatgtgtgtttggtattttcgtgttttttaaaattttttaaagagtagatttaagatataaatgtatttttagatatttaatttagtttgtttttagtatttttattacgtttttattatttatttttatttatatttgttataatttatttagttgtgaggatggattttttttaaatattttaattttataataggttgaatgaaaaaaagaagatagaagaatttagatattttttaataagttagatgttagagatttgtaaaaatataaaatattgtttattaatttttgtttttaaatatagtttttttttggttaggtgtggtggtttatatttgtaattttagtattttgggaggttatggtgggaagattgtttgaggttatacgttttagattagttgagtaatatagtaagattttaattttatttttttgtttgttttttttttttattttttttatatgttttaatttatttttttaagttttttttagatataaaaatgttatttatgttaatatatgatttttttttttaaagttagttaaatttagtagcggggaggttgtatattaattttagtgatattaatgttaataagttttgataatttattattattagattagtatgatttttaaatgatttaaaatttttttattttttagttttaattttagattgataaatattaattgatataattaatgtaaataaaagatatttggggtttttaatttttgagagtataaagaagttcgggttgggcgtggtggtttacgtttgtaattttaatattttgagaggttagggcggaagggggtggggtattgtttgagtttaggagtttaagattagtttaggtaatatggtgaaattcgatttttatataaaaatataaaaattggttgggcgcggtggtttatatttgtaattttagtattttgggaggttaaggtgggaggattataatgttaagagatcgagattattttggttaatatggtgaaattttatttttattaaaaatataaaaattagttgggtatggtggtatgtatttgtagttttagttatttgggaggttgaggaagaagaattgtttgaatttaggaggcggaggttgtagtgagttgagattatgttattgttttttagtttggtgatagagcgaggtttcgttttaaaaaaaatttaaaaattagttaggtgtggtggtattggtttgtagtttagttaattaggaggtcgaggtgggagtttgtaaggttaaggtatagtgtgagatgtgattatgttattgtattttagtttgggtgatagagtgagattttgttttaattaaaaaagaaagaggttaaggtgggcggattacgaggttaggagatcgagattattttggttaatacggtgaaatttcgtttttattaaaaatataaaaaattagtcgggtgtggtggtgggtatttgtggttttattattcgggaggttgaggtaggagaatcgtttgaatttaggaggcggagtttgtagtgagtcgagatcgcgttattgtattatagtttgggtaataaagcgagatttcgttttaaaaaaaaaaaagaaaaagaaaaaaaaaaaaagaaagacgttgggtatggtggtttacgtttgtaattttagtagtgtgggaggtcgaggcgggtggatatttgaggtcggagtttgagattagtttggttaatacggtgaaattttatttttataaaaaaaaatacgaaaattagttgggcgtggtggtaggcgtttgtaattttagttatttaggaggttgagttataagaattgtttgaattcggaaggtagaggtcgtagtgagttgggagtaaattattgtattttagtttgggcgatagggcgagatttcgttttaaataaataaataaatgaaaaggaaagaaaggaaagaaaagaaaggaaggaaagaaaggaaaggaaaggaaggaaaggaaggaaggaaggaaggaaagaagttttgattaaaaagttttgagaatttttttattttttaaaattttttttaaatttttattttttttatgtaggtttttgtaattattttggttttttaaaaggttagagaaaaaaaggattaatgatagtatttttagtttgtttttaattgttttgttttttaaaatattgtttttttaatagagcgtttataaattttagaagtatttttgttgtataatgaaaatggaattttatagttttgatgatgtatatttaaataaaaatatgattgttaaatagtttattattgaattagtttgtaagtgaaatttgttttgagattaggatgtattttgaatagagtttgttttatttgatatttttattagtttttgttaatgtttaattgaaggattttaatatatagggtatatatttataatattagtttgtttattgattttatttttttatgtttgttaattttgattttgtaaataaggttttaaggaaaaatatataaaataatatgtagatttaattatatttgttaacgtagtattttagatttttttaatagttgtacgagaatttttataaaattaatttttggttatttaatagttaattattgatttttttttttgttaaggtttagtttgaagatttaataagattttttaaatgggaataaatattttgtgttagtatgtaaagaataattatgaagttaaaaaagttagatttttttacgattttaatttgtggaataaaaaattttaatggaagtattttgtttttaagtagattttttataaagtggtagaaaagtgtttttatttatataattaaagtattatgaaaaggatttgtttggaaattagaaagtaaatgtgaaataaaggtttttagtttgttattttatgaaaaagtttaaacgttaaagtttaggtagataatgaaatttataagtattttatagttcgtggtgcgtatttgaattttagcgtcgagggaggagggtgcgtttgggttttattttttattgttttaaaaataagatatttttaaattgggataattatatttattaaattaagtaaatagttttttaaattaattttttgtttggttagttgtgtattcggttgatttatttggttagtgaaaaataagatcgtgtttgttttttttttagtattattagggtgtgtaagttagttttgtttaaatatatgttacggtgatatagaaagtacgttgaagaaatagagagttttaattatttaaggtggtttttgggagatttagtcgtttttcgttttttttttcgttttttttatttttatttcggtattttcgcggttagtgtttttttgtcgaggttcgcggggtttcgttttagaatttttcgaatcgtttacgaagtcgtttttttcgagtttttcgagagatttagttcgtgtgattaaggttagtattttagtttcgtttgttatttattttgttgggtttttaggtcgttgtcgtttcgggtttaggcgatgttatttttattagatttattcgggaatgaaggtagagataagaatagagtagagaggtggtaggacgggtagtaggtttcgtcgaggagataggcgggatacgggcgattggttgttgatgtcggagtggaggtgatagatggcggcgacggcggcggtcgcgttcggaattggattttttttttttcgtttttttcgttaggatagtcgtttgtaattggtcgtacgtttttagtttttttttaaggtattttttttcgttttcgggcgggttattttcggttgttgatcgtcgggttcggagaagtaagtattagttggttgtcgtttggggttacgttgtttgtgtcgggtagggtagggtaagaattgggtgtggttttttttggtttaggttttgttttgttttcgtattgttattttttttttttttttttggtattttaaaaattgtcgttggatttaaattagattagattagtggattgtaaataaataaataaattaggttttttttgtttatttattattttttggagtagttttaaattgggatgatttgggagatagaaaacggtaggtttatagagggaaagggtttggaaaggacggtcggagtttgtggtggttgttgttgaagggcggggcgtggaatgcggaaaatgtgtaaaatgtgttacgtaatagtgaataaaaataagattgtataataaaatttttgtttttgtattttgtagagattttaataaaatgattagataaaagataattaaatattgtattttatttagtatattaatgtattgtttaaattttttattaattttttagtttttaaaattatcgtgagagttaaattttgttattatttttattttattgatattgaaattgaggtatagagaggtaaagtaatttagttgaggttatatagataataagtggtaaagttaataaggggtgaatttagataatcggtttgggaattggattggttgtatattatattttgattataaattatatattgtttatatgttgtatatttaaatattttagaaataggtattgaataattgttttttttaaattttagtttcgagttagtatttttaattgtttatatttgagagttttgggttattgattttaatgatttttattagtatataatttttgttttttttttattttaggtgaaaatatgttttgaattttttaaatatttttattgtaataaggtaaattatagttatatgatagggtgtagatgtgtgtttggtaaatgttgtttatatatgtgaatgtgtgtggaaattgtgtttttttttagtgtttaaaggattataattggacgataaatagtttaagaaaaatgggtgtaattattaatagaaatggattttttaattttggttaggaaaaaataggagagggttgggcgtggtgggttatgtttgtaattttagtattttgggaggttaaggtgggtggattatttgaggttaggagtttgagattagtttggttaatacggtgaaattttatttttattaaaaatataaaaagtagtcgggtgtggtgatacgtatttgtaattttagttatttaggaggttgaggtaggagaattatttgatttcgggaggtcgaggttgtaattagttaagattatgttattgtattttaatttgggtaatagagtgagatttcgttttaaaaaaaaaaaagagaaaaaagattaaaaggaaaagattagattagaaagaaaggttaaggttgagatgtagtgtatgataaaaatgtgttagtgagagattatttgggggatatattagaaaaggataggaagtcgaaaataaaattaagaatttgaatattttttttgttttgttttgaatgtaaaggagagaggttagatttttttttttttaattttttttttttttttttttttttttttttttttttttttttttttttttttgaaatagagtttcgttttgtcgttaggttggagtgtagtggtatgattaaggtttattgtaatttttatttcgtgggtttaagcgatttttttgttttagtttttcgagtaggtgggattataggcgcgtgttattgtattcggttaatttttgtatttttagtagagacggtgttttattatgttggttaggttggtttcgaatttttgatttcgtgattcgttcgtattggttttttaaggtgttgggattataggcgtgagttatcgcgttcggtcggaagaggttagatttatttagatgttaggaaggattttttagagtagatgatatttgattttagttttataagatgattaggtattggtgagatgggttgtaaggtggagtagggttttttgtataaggggagtagtttttagggtatttcggaaaaggttaggtggttcggtatggttagatgtagggtttaatagggataaagtgagagaatgggttggagaatgtaggaaaggtttaggtttaagagttttttttgtttttgtttttgttttttgagacggagttttattttgtcgtttaggttggagtgtagtggtatgatttcggtttattgtaatatttttttttcggatttaagtagtaatttttttgttttagtttttcgagtagttgggattataggcgcgtgttattatatttagttaattattattattattattttttatttttttatttttggatatagtgttattttgtagtttaggttggagtgtagtggcgtaatttcggtttattgtaatttttgatttttaggtttaagcgattttttggttttagtttttcgagtagttgggattataggcgtttgttattatattcggttaatttttatttttatttttttgtattttttattaagagacggggttttgttatgttggttaggttagtttttaatttttgattttaggtgattcgtttgtttcggttttttaaagttttggaattatagacgtgagttattgcgttcggttgatatagtttttaaatgtgttaatatttttagtttaattttaagttttagaaattttttttttttttattttaattttgatttaattttttttatttttaagatttgatttttgggttttggtgtcgatgttggtagtgttagatgggggtagggtaggatgggaggtaggtattttaatggaggttaggaagtttgagataattttcgttttttgattggttgattgggtggaaggcggtgtttggagatttggtttgaagggaagatgatagaattaattttatgttatatatgttataattaggttgtttatggaatatagtagcgattaaaaattgtaaaattgtaaatatatatttatttgtttatttgttttttttttttttttaggagagtaggaattgtgtttattattgtaaattagtgtttagtatggtggttggtatatagtaggtatttaataaatatttgtaaatgaataaattgtatggatgttgtttgaaagtggttaataggtagtttagagtttatgagaaaaaataggggttgaaaataaaaatttagtagttattataattatcgtttattgaatgtttattacgtgtttaaatattttaaatatatgagtttattaggttttattttttgttttgttttgtttttatgatagtgtttttttttgttatttaggttgagtgatagtttattgtaatttggaatttatgggtttaggtgatttttttattttagttttttgaatagttggaattaaagagacgtgttattaagtttggttgatttttaaatttttagtagagagggggtttcgttatgttgtttaggttggttttgaatttttgggttgaagtgatttttttattttggtttttcgaagtgttgggattataggtatgagttattatttttggtcgatttttaaaataattttgggggatattgttatttttatattagaaagttgaaagttggagagtttgatgtgatatataatgaattatgtggtttataatggttgtggagataattttttgttttttgtttttttatttttgagacggagttttattttgttgtttatgttggagtgcgatggtgtgattttggtttattgtaattttcgttttttaggtttaagtgatttttttgttttagttttttgagtagttgggattataggtgcgtgttattacgttttgttaatttttgtatttttagtagaggtggggttttattatgttggttaggtttgtttggaatttttgattttaggtgatttatttatttcggttttttaaaattttgggattataggtatgagttattgtatttggttggatataattttaaaaggagttggttgttaggaagaatgtagggagttagggataggagattttgatgtattggagtaaagaaatttagtgggagaaaggatattttttggagttaaagaattaagttggtgtggatgtggagaaatgggaatttttatatatggtttggaatgtgaaatggtgttttgttatagaaaatagtttggtagttttttaaaaagttaaatatagaattattatataatttagaaattttattcgtaggtatatattttaaagaattgaaaatagataattaaatatttgtatgtgaatgtttataaaattattatttatggtagttaaaaggtagaagtaaattaaatgtttattagtggataaatggataaaatatgatatatataaataatagaatattatttagttataaaaaggaaaagttatgggttgattttgtatttttataaaattcgtatttgaagttttaatttttagtattttagaatgtaattatatttggagataaggtttttgaataggtgattatgttaaaataaggttattaggatggggttttattttagtatgattagtggttttataaaaagaggaagaaattttagtattatatttatgtatatagagatgattatgggaagaggtaattagagggtagttatgtgtgggttaagaagagaggttttagaggaaatt

SEQ ID NO: 431 - DNA, 5242 bp, Artificial Sequence
  chemically treated genomic DNA (Homo sapiens)
ttagaaagtggtatttgtgtttttaaggtaggtgtgtgtgagagagagcgtagatagatattatgtttttttatgtgtatgggggagtgaagtttgggtggaaaagtgtttttagatgtgattttttttataagaagttaagtaattgttttgaaggtttagggggtttggaaaaatagggttgtttttttatcgtgtgtatattttagttttttttgttttagttttttgtttatggggttttgtttggatttgtgtgttggtgttaagaggtttttttagtattgttatagggatttaattttttggttttgtggggatgtgtaagtgaggtcggttaggttttagttgtttttttttttttttatgttgagttagaggttttgattttgttgaatttggggtttttttgttggggagatgggggtagtgtttttttgttaatggaggtgtaggattattagggagggttgtggttatgggaagtttgtaattttagtgtaaaagtttttattaatttgtattttttaagttttttattttttttgtttggagtggaagaggataggcgttattttattttggggatgaggaagttgtattgtttaggtgtttgtttttgattatgttttagtgtttattttgtttgttttttattttttgttttgtaggtatgagatatttttgggttttaggagtttagtaggggttttattttttttttgcgattttagtttgtcgtttgattagagaaatatttttgttagtttttatagatttggttggggatgggatttgaagtttaggattgttagggtaatatggtatttttggttttatatttttttggagaagttgggttttaagagatagtagttaggtgattgggttaggttgatttttcgtttttaattaggttgagtaaaaaagtgggaagagggggttatgtgtatatattaaagtgtttcgtattgttttttttttgtgtattttttatttttgttttttttttatttaattttttataatttttttttaggaaaaaagtgtgtgtttgtgtggggaaagttttattgtggataattatatttaattttgtttagtttagaaggtttttatttgtttaattaaatatttattttggttgaggtggagggggtaggggtagtgtttggaatgtgtgtgtgtgatttgggggaggaggaggggagaaggtggagttgaagtttttttattggtagtgttgatttttgattttattcgagagagtagtgattaggagtggggataagggggtaaagtttttgagttggaatattgattcgtgataggttgagggatttcgtaagggttatagtggtgggtgggggtggagcgggagttgttagagtagtagtaggattagtttagtttagttgtggttttaggttttgtttttagttagtggtattaattagtttttaggttattgtggataataattttattatttttttttttttttgtttttgtttttattttttgggttagtttaaattttatcgttttattttttttttaggagaataaggggtggggagtttggaaaagattgttatggttattttgttgcggttttttgttgagttttaggattgttaggtgtttgttggatttagtatttttggtttttttggattattttgttattttttttagttttaagtagttgttttttttttatgagttatatacgtttgatcgtttttttttttttttgggtatttaagtggttatttttattatgttgttcgttttttagttgggggaggaggtttatatagcggtttttttttagattgagagggtatgggtgtttttttgtagattaggattttgttttttggatgagtatttatacgaaatagttttgattaggtatcgtggtttatgtttgtaattttagtattttgggaggttaaggttggtaggttgtttgagtttaggagtttaagattagtttgggtaatatggtaaaattttgtttttattaaaaaaaaaatttaaaaattagttagatgtggtgtgtgttatttggtagtgtatgttatttatagttttaggtattcgggaggttgaggtaggaggggaggatggtttgaatttgggaggtggaggttgtagtgagttgtgattgtattattgtattttagtttgggtgatagaggaagattttgttttaaaagaaaataaaagaatagtttttaattttattagatgtattggttcgtttttttggttttttgttttataatttttgattttttgtagttttatttttatttttttttttgaagagttatatatagggtttttttgttttgtgtgtagggattagatggtttggtatggagtgttaattttgtgtgtagtagttcgatgtttagtgattgtggagtttagtgttatttggggatataattttgttttattttggttttttttttttttttttttttgagatagagttttattgtgttatttaggttggagtgtagtggtaagagtatggtttattgtaatttttattttttaggtttaagtgatttttttattttagttttttgagtagttgggattataggtatgtgttattatatttagttaatttttgtattttttgtagagatggggttttatcgtgttgtttaggttggttttaaatttttgagtttaagtgattagtttgttttggttttttaaagtgttgggattttaggcgtgagttattgtttagtttattttgttttttaatttttttttagggatttgttatttagatgggttgtaggttgtagggaaggggaagaagggtttgttttagttttgtaatgttttggggtattttttggaagtttttagttgagttggtttggaggttcgaggaagtggttagagtgtagggggataagggagggattttatttagattgttggttatagtttttagggttaggttttgtttgttttgtaggttaagatagtaaaatgataagatttttaaggttttttttttatttttcgaaattagaggttgtaaggattttaagttttttaattttagggaattacgtttgtaggttgttgtagataataaatgttttttttttttttttgagatagtttcgttgttatttaggttagagtgtaatggcgtgatttcggtttattgtaatttttgttttttgggtttaagcgatttttttgttttagttttttgagtagttgggattataggcgttcgttattatatttagttagttttttgtatttttagtagagatgaggtttcgttatgttggttaggttggtttcgaatttttgatttcgtgatttgttagtttcggttttttaaagtgttgggattataggtatgagttattacggtcggtttaatagtaaatgttaaaattggaaagttatcgtattatagatgaggaaattgatttgtttaaggttatatagttaggatagggatttagagttcgattttttgtttttttttttttttgatatattttgaaaatttttatttatttatttttttttttatagttatttttttttgatgtttttttttttgttttttatttaggatgttttagattttgtatgattatttttggtgggaacgtttgtggttgtttgtgaatttgatttgggtcgatttagaagatcgagatggacgtgtttacgttaaagttttagatttttatattacgttgtttttggttttgtttttttttatcgttcgatatttttttgagttgtaagtatgttagtttatttttatgtttttttttgttgttagttgtagttttttggattttaagtttgttttttgttgtttaattagtttttgattttgatgttttggttatttaggtttttgtttattgtgtatttttttttttgaaggtattattgtttttttgaaggtttagtatttttaggttttttttattaatggttatttgtttttattttttattcgtcgttcgtttggttattagtgaatatataggtagttttgttagttgtgggtagttttggaggttagagaaaagggggttgttaggaagttggggaaattgaggttagggtaaagttgttttagtttgtagttttttttttttttagtaagttagatattttatttatattttttttttaggtacgtggttatattattggttgtttttttgaatataaaggagaaaattcggttgcgggtattttttaacgttattttggaatatttttatttgattagtggtaagtagtttaagtaggtatgagtcgtatgttgttttggttttgggaattattgagtttggtggtggggggatagggtttgaatgttagttttggtaggtgaagagatggggaagtagtggtgttgattgaggttgttattgggagaggttggggatgttgttgagtttcgaaggtaaatataataatgggtttttttattgtgtttaggtggaagtagagtttttgtttcggtagagcgggttttttggtcgttaggtagcgcgttggtttcgtcgtcgtcgtaattaggatcggtttagtttttttaagaagtttcgagaagttaggtgggggaggttggggtagaagttgggtgataaggaatattttgatgtgttttgttgggagggataggcggtggttatacgtagggagatgtgaggaggtgaatttagttattaatggtattttgtgagggtatttgtaggtatttgggggttgttgggggattgtgttattttttgatttagttatttttgttttttttgttagttggagatttatattttatttgattgtttttattgtcggtatggtcgttattgtggatgtgagtggggattattgggaggtgggagtaggttttttggtaaggttaggtgaggttatggaatttgggtttttttttttttaattttttattatttttttgtagaaattttggttttatgatatgaagaaagtttgggagggatattttatataggtatgagttttgtttttttatgtgggggtggattaagatatattttagtgaagagacggtttgtggaatttatggtagagggattagagtgatggaatgaagaattttaggggttagggggtttgtggagtggggatatttttgcggttggttgtttttatttttttttttttttttaga

SEQ ID NO: 432 - DNA, 5242 bp, Artificial Sequence
  chemically treated genomic DNA (Homo sapiens)
tttgggagaggagagagaggtaagagtaattagtcgtaagggtgtttttattttataaattttttagtttttgaggttttttattttattattttaatttttttgttatggattttataaatcgtttttttattagggtgtgttttagtttatttttatatgaggaagtagaatttatatttgtatgggatattttttttaaattttttttatgttatagaattagggtttttgtagagagatggtgagaagttaaaagaggaggaatttaaattttatggttttatttgattttgttagagaatttatttttattttttagtaatttttatttatatttataatgacggttatgtcggtaatgaaggtaattaggtaaaatgtgaatttttagttggtagaggaagtagaaatggttaggttagaggatagtatagttttttagtagtttttaaatatttgtagatatttttataagatattattaataattgaatttatttttttatatttttttgcgtatagttatcgtttattttttttagtaagatatattaggatattttttgttatttagtttttgttttagttttttttatttggtttttcggaattttttgaggagattgggtcggttttggttgcggcggcgacggaattaacgcgttatttggcggttagagagttcgttttgtcgggataaaagttttatttttatttgggtatagtgaagaagtttattgttatgtttattttcggaatttagtagtatttttagttttttttagtaataattttagttagtattattgtttttttatttttttatttgttagagttaatatttaaattttgtttttttattattaaatttagtgatttttagagttagagtagtatgcggtttatatttgtttgggttgtttgttattggttaggtagaaatgttttaaggtggcgttgggaggtgttcgtagtcgagtttttttttttatgtttaagagggtagttagtggtgtagttacgtatttggggaagggatatgagtaaggtatttagtttgttgggaagggaaagggttgtaagttaaggtaattttattttggttttagtttttttagttttttggtaatttttttttttttagtttttagggttgtttatagttgataaagttgtttgtgtgtttattagtggttaggcgggcggcgggtagagggtgagaataaataattattgatggaaagggtttgggggtgttgagtttttaggaagataatggtgtttttaggggagggggtgtatagtgggtaggaatttgagtagttagaatattagggttaagggttaattaaatagtaaggaataaatttgaagtttaagaaattgtaattggtaataggggaaggtatgagggtaggttggtatgtttatagtttaaagaagtatcgaacgatgaggaagagtaaggttaggggtagcgtgatatagagatttgaggttttggcgtagatacgtttatttcggttttttagatcggtttaggttaagtttataggtagttatagacgtttttattagaagtaattatataaggtttggagtattttgagtgaggggtaaaggggagggtattaagagggagtagttatggaggaagagatagatgaataaaagtttttaggatgtattaaaaggagaagggggtagagagtcgaattttagatttttattttggttatgtagttttgggtaaattagtttttttatttgtaatacggtggttttttagttttaatatttattgttaggtcggtcgtgatggtttatgtttgtggttttagtattttgggaggtcgaggttggtagattacgaggttaggagttcgagattagtttggttaatatggcgaaattttatttttattaaaaatataaaaaattagttgggtgtggtggcgggcgtttatagttttagttatttaggaggttgaggtaggagaatcgtttgaatttaggaggtagaggttgtagtgagtcggaattacgttattgtattttagtttaggtgatagcgagattgttttaaaaaaaaaaaaaaagtatttattgtttatagtaatttgtagacgtgattttttggaattaagaaatttggggtttttataatttttgatttcggggagtgggggaagaattttgggggttttgttattttgttattttaatttgtaagataggtaggatttggttttagaagttgtagttaataatttgagtaaagttttttttttatttttttatattttggttattttttcgagtttttaagttaatttagttgaaagtttttagggggtgttttaaaatattgtagggttgaggtaaattttttttttttttttttataatttataatttatttgagtagtaagtttttaaagaaaaattaagagatagggtaggttgggtagtagtttacgtttgaaattttagtattttgggagattaaggtaggttgattatttgagtttaggagtttgagattagtttgggtaatacggtgaaattttatttttataaaaaatataaaaattagttggatgtggtggtatatgtttgtaattttagttatttaggaggttgaggtgggaggattatttgagtttgggaggtgaaggttgtagtgagttatgtttttgttattgtattttagtttgggtaatatagtgagattttgttttaaaaaaaaaaaaaaaaaaaaagttaaggtaaagtaaaattatgtttttaaatgatattgagttttataattattggatatcgaattattgtatataaggttgatattttatgttaagttatttagtttttatatataaggtagaaggattttatgtataattttttagaaagaaaagtgaaggtagggttgtaaagagttagggattgtggggtagggaattaagagagcggattaatatatttgatggaattaagagttatttttttatttttttttgagatagggtttttttttgttatttaagttggagtgtagtggtataattatagtttattgtaatttttattttttaggtttaagttattttttttttttgttttagtttttcgagtgtttggggttatgagtagtatgtattattaagtagtatatattatatttggttaatttttgaattttttttttggtagaaatagggttttgttatgttgtttagattggttttgaatttttgggtttaagtaatttgttagttttggttttttaaagtgttgggattataggtatgagttacggtgtttggttagagttatttcgtataaatgtttatttagaaaatagaattttagtttgtaggggaatatttatatttttttagtttaggaaagagtcgttatgtaaatttttttttttaattgaaagacgaataatatggtgggagtgattatttggatatttagaggagggagggaacggttagacgtgtgtggtttatgagggaagagtagttgtttgaagttgagaggaatggtaagatggtttaggagagttagggatgttgggtttagtaaatatttggtaattttaggatttagtaagaagtcgtagtaggatgattatgatagttttttttaggttttttattttttgtttttttgggaaggagatgaggcggtgggatttaggttggtttagaaagtgaaagtagagataggaagaaaagagagtggtgaaattgttatttatagtgatttggagattagttggtgttattgattgaagatagagtttgagattatagttgggttgggttggttttgttgttgttttgatagttttcgttttatttttatttattattgtagtttttgcgaaattttttagtttgttacgggttagtattttagtttaaggattttatttttttgtttttatttttggttattgttttttcggatgaaattagaggttagtattgttagtaaaggagttttagttttattttttttttttttttttttttaaattatatatatatattttagatattgtttttgttttttttattttagttagaataaatatttaattaaatagatggaagttttttgaattgaataaaattaaatgtaattatttatagtggaattttttttatataaatatatattttttttttagagaaaagttgtagaaaattgaataaagaagggataagggtagaaaatgtatagagaagggataatgcggaatattttgatgtgtgtatatggttttttttttttatttttttgtttagtttgattggaagcgagaaattagtttgatttagttatttgattgttgttttttggagtttaatttttttagggaaatgtaaagttaaaggtattatgttgttttggtagttttagattttagattttatttttaattaggtttgtgaaaattggtagggatgtttttttagttaggcggtaggttggagtcgtagagggagggtggagtttttgttggatttttggggtttaggaatgttttatgtttgtaaagtagggggtggggggtaggtaaagtaggtattagagtatggttaaggatagatatttgggtagtgtaatttttttatttttaagatgagatagcgtttgtttttttttattttaagtagggagagtggaagatttgggaaatgtagattaatgggggtttttatattgaggttgtaggttttttatgattatagttttttttggtggttttgtatttttattagtagagaggtattatttttatttttttagtagggaggttttagatttagtagggttaggatttttgatttaatatgaagagaggggaggatagttggggtttggtcggttttatttatatatttttatagaattaaagagttgggtttttgtggtagtattggggaggttttttagtattagtatatagatttaagtaagattttataaataagaggttggggtaagaaaagttgaagtgtatatacggtaaggagataattttgtttttttaggttttttgggtttttagggtagttatttgattttttatggagaaaattatatttagaaatatttttttatttagattttatttttttatatatatgaagagatatggtatttgtttacgtttttttttatatatatttgttttggaggtatagatgttattttttga

SEQ ID NO: 433 - DNA, 5750 bp, Artificial Sequence
  chemically treated genomic DNA (Homo sapiens)
agttttagttattcgggaggttgaggtagaagaattttttgaattttggaggtagaagttgtagtgagttaagattgtattattgtattatagtttgggtgatagagtgagattttgttttaaaaaaaaaaaaaaaaaggatatttgggattgtagggaaatattattgtttgtgatatttttgtataataatagattatataagaatttgttatatttttggtatttgagatggatttgataaatttatttgttttttgtttgtttggtatttttatggtttatattttttttgtcgtttttggaggtaatagtatagtttataatttttatagtacggtgttatttttaaatggagttttaaggatatggatttagggatgtgggggagtttttatttaggtttggtagtgtgggtttagagagtagatggagtcgagttaatgtatttttatgttagtatcgtgcgttagatatttagttatagacgtagttttgtgtttattgtgtttgtgtgtttgtgtttttgttttggatagaatatatttaatagcgtatttggattgatgaataatttttaaatatttggatatatggtaagtaggtttttgtttgtatttttgttttggggattgtatagtgttgggggtggtttgaagttggagataattattgataagttttagtatatgagtggatgttatttggagaaagggtagaataaggaggaaaggtgagtaaagtcgatggttgttgatattcgtttttttttatgattcgtatttttttttttttattttgttttttttttttttgattttttgtttattttttttgttttaagtttaaaaataatttatttttttttaggttttagaatatttattgatattataagtattaggtatgtttaatagtgattattagtttgggtgtttggagtaggggtggcgatattgaattttgaaagaatagattttttaggtagaaaataagtgtaaatagtgaatattttacggaagagattttttttaagatgcgttttggaagggcggaagaatattttataggaagtttattttgagggttttttttttttaaatgttttttttattttgtttagaattgttgggtttttatgttatttagttttaaagtatttagttgtttgagatatttaagattagatttatagttaattaaaatgaaataaaatttattttttggtttatttatttatttattttttttttattttatttatttatttatttttttgagatggagtttcgttttgtcgtttaggttggagtgtagtggtacgatttgggtttattgtaagtttcgtgtttcgggtttacgttatttttttgttttagtttttagagtagttgggattataggtatttgttataacgttttgttaatttttttttgtatttttagtagagatggggttttattatgttagttaggatggtttcgattttttgattttgtgatttttttattttagttttttaaagtgttgggattataggtatgagttattgtattcggtttattttttggtttagaatgagatgtttaggatgtgatgaaatagattattaatattgtttaggatggatgaaatatattattaatattattaatattgttaaagtgttgttgttttgtcggggttatttttgatttagtttgagatggttttatggaatagaaaaagtttttgttgtatttgaaagattatagggttataatggataaagtaatatgatatatgttataaagtaaatgaaaattatattaaaagagtattatatttttggttagtttagatagtatgtatatttggttaattatataatttgatttagtttattacgatgattttatattatataaaaatgtatgtagtaatatgaattttttttttttttttttttgagatagtttagttttgttgtttaggttggagtgtataggtgtaaatatggttgattgtaatttcgattttttaggtttaagtaatttttttattttagttttttaagtagttagaattataggtatatgttattatatttagttaatttttgtattttttgtagagatagggtttgggtattttgtttaggttattttgaatttttgggtttaagcgatttttttgttttagtttttttaagtgttgagattataggtgtgagttattgtttttagttatgaattttttaaacgtttgagtaaagttgagtatagtttttagtagtagaattttgaagtggttgattttgtttaattgtgggttggtaaaattaatgttgagatttttttagtttagtaaagatttttatgttattggtataaaagtttgaaatagtgagttaattattgtgttgggaaattaaatatgttatttttagaggaagtaatgtttttgtttatagaatgtttaaaacgtagattagtgagtagtatttagttaaatgaaatatggtttagttaaatgttatattgtaatgttaaatagagtattatatgtaaataaggagattatttggttagatggtgatttttaaagtgttaggaggggattagtagttcgatttttatggtgtgatatttttatatttagttaatttttgttaaagtggggtaaggagggattttatagatgttataggtaagataatttttagatgatcgttagtatttgggaatatattttgtaggtagtttatgcgtttttttttttttttgttatgatttgttttgtggtggttttattgatggttagtgtgggaggtagggaaggaatattttaaattagtaagtttgattatagtaatttttatttttttgagaattatgtgttaagtattgagttaagtattttatgtttatcgttttatttaatttttatttacgaggaagatgtatggtgttattgtatttgtaagatgtgtttgtaaaaatagagttagggaggttgagaaatttgtttaagattatataattgaggtaggagaatggggaatatgaggcgtgagagagtaaagggaataaaaattattgggaatcggtaattttttttattttcgagagtggttagggagagagaggttgtttgagggaaggaagttcggtaggattcgttgtagatttagggttaagggaagtttcgcgggaggaaacgcgggcgcggtggggttggttttaggtacgcgggttaagggcgggagggtcggatacgaagttataaggtttttttttttttttttttttttcgtttgtttttttttgtttttgcggtttgattttcgagtttttttgtttgtaggcggcggtagaacgttcgtatttgttcgtattttagcgttgttttttaatcgagtcgcgtcgcgttttttttttttgtcgggagagttcgtgttgggaatcgcggggtaggaggacggtttaagttattttcgatgtttttttttagtttacgtttgttttagttatagtttttttggtttttttgaggttttttagttgtttaatgatgggtaggtttatttatagtttggagtagtcgtttttttttttttttttttttttttttttttttttagaaatatttttttttttttttttttattttttttttttatttttttttttttttatttttttttttttttattttttcgttttatttttttttttttttatttttttttttttttttttttttttttttttttttttgtttttttttttttttttttttttttttttttttttttatttttttttttttttttttttttttttttttttttttttttatattttttttttttttttattgtatttttttttttttttgttttttttgtttttttttttttttttttttttttttttttttttttttttttttttttgtggttggagtgtagtggcgtaatttcggtttattgtaatttttattttttaggtttaagcgatttttttgttttagttttagtagttgggattaaaggggtttatcgttattattttttgttaatttttgtaattttagtagagataggtttttgttatgttggatagtttagtgttaaatttttgattttagatgatttatttatttcggttttttaagtgttgggattataggtatgagttatcgcgtttggttttttttttttttttttttttttaaagaaaaattgaaattatggttttttaaaaattttttttagtttttagttttatcgaattacgttttggttattgatttgtcgtgtgattgttgtgttttttttgtttttatttttttttattttttttttttttttttttttgttatttatgttcggaggagtacgataagggattaggtcgatttgggttttaattttgtttgttttttgttttgttgacgttttaattttatttgtagttttattttttttatttgtatagtgtttttttagtaataatagtagttatattaagttttagggttttttcgaggatagtgtgtatttatcgtagtgtatttttgatgtttggtatatcggttgtgtttaagtaatggtagttattgtattatagtgattatggagttaggggatcgtatatggtaaaatgttgattattgttttgaatttggttttatttttttaattttaaatttagtgttttaaggatatgttaaatgttttgttttggagagttattttaagggataaaatcgtttttttagcgttatttgtgatatattttgatagtagagagttgtttttaagaagtaatttgaagtgttattattaggtagggacgggggttttaggggatttcggggttagtagatatgaaatgaatgattttatagggttgttatagagttgtggtgggaattttttatgagatttcgtttttggttgagttatcgtatttttgtgtttgatttgaagttttttcgagttgtagaagtttgaagattaaggagtggaaagtttttcggtagttttgagattttaaggtttgtttatttgggggagtgggtgggggtattgagaaggggtgagattggaatttttgttttttttgtttatttttagatttttttttttaatatgtaataatttttttttaatagttttttaaataaatattaataatttagtttgaagagttttttattttttagttttgttattatataaattttatattttaaaatatgtttttgtttaagaaaatgtgttagtgagttgaatagggaggtttttttatatgttagtagttaggtgtttagttaaagggggaagagtgattatgtgatagtttttttttgaattgaattgtttgatgtttttgatagattttttttgtaaggagtttattttaggggtaataagtaattggtattattgttggttggtattgtaaagtatttatgaaagtttttaaaagtttttgttattgttatttttgtattttggtagaatatgatggaaaatgtatttttaaattttggtaaatcggtataaagttgtgtgtttaattacgtttgttttgttttagtggtttttatgaatttgttattttttcgtaatattgtattattaattgtttttgaaaaattttgagttatttttttatagaattgtataagtaatgattgtaatatagataattttgaaaggagaaattatttttttttggaaatgtttattttttgtaga

SEQ ID NO: 434 - DNA, 5750 bp, Artificial Sequence
  chemically treated genomic DNA (Homo sapiens)
tttgtaaaagataaatatttttaaggaaaggtggtttttttttttaaaattatttatattgtaattattatttatataattttataagaggataatttagggttttttaggaataattaatgatgtaatattacggaaaagtagtagatttatagaaattattaggataaggtaggcgtgattaaatatatagttttgtgtcggtttgttaaagtttgagggtgtattttttattatgttttgttaaaatgtagaaataataatagtaagaatttttggggatttttataggtattttgtagtattaattagtaataatgttaattatttattgtttttgaaataaattttttataaagagaatttgttaggggtattagataatttagtttaagaagaagttattatataattatttttttttttttagttgaatatttaattattaatatgtggaaagatttttttgtttaatttattaatatatttttttaaatagagatatgttttgagatgtgaagtttgtatggtaataaaattaaggagtgaaaaattttttaggttaagttattgatgtttatttaaagggttattgaagagaagttattatatattaggagaaaaagtttagaaatgggtaaagggagtaaaagttttaattttatttttttttagtgtttttatttatttttttagatggatagattttgagattttagggttgtcggagaattttttattttttggtttttaggtttttgtagttcgagaggattttaggttaaatataggagtgcggtgatttagttaggggcggggttttatgggaaatttttattatagttttgtgatagttttatgaaattatttattttatatttgttgatttcgaaattttttagagttttcgtttttgtttgataatggtattttaaattgttttttggaagtagttttttattgttaggatgtgttatagatgacgttgggaaaacgattttgttttttaagatagttttttaggataaagtatttagtatgtttttaaaatattggatttgagattagaggaatgaaattaaatttaaaatagtgattagtattttgttatatgcggttttttaattttatagttattgtaatgtaatagttgttattatttgagtatagtcgatgtgttaggtattagagatgtattgcggtgaatatatattattttcgaaagaattttagaatttggtatgattgttgttgttattgggagaatattatgtaaatgaggaaagtggggttgtaagtggaattagagcgttaataggatagggagtaggtagggttggaatttaggtcggtttggttttttatcgtgttttttcgggtatgggtgatagagggaggaaggagggagaaatggagggaaatggaaataggggaagtatagtagttatacggtaagttaatgattaggacgtggttcggtgaagttgagagttaggagggatttttagaaaattatgattttaatttttttttaaaaaaaaaaaaaggagaaagagattaggcgcggtgatttatgtttgtaattttaatatttgggaggtcgaggtggatggattatttgaggttaggagtttgatattagattgtttaatatggtaaaaatttgtttttattaaaattataaaaattagtagggaatggtggcggtggatttttttaattttagttattgaggttgaggtaggagaatcgtttgaatttgggaagtagaggttgtagtgagtcgagattgcgttattgtattttagttataaaaaaaaaaaaaaaaagaagaagaagaagaagaagaggaagaggagggtagagaaagtagaaggaaaaaaaagtatagtaagaggagaggaggagtataaggagaaagaagagggagaagaggaggaggaggagaaaaataaagagaaaaggaggaggaggaggaagaagaaaagaatagaaagagaaggggaagaggaagaggagaaggaagaatgaggaggagaaagaatgagacggaagaatgaggagaaggaagagtgaggaggagaaagaatgagaaggaagaatgaggagaaggaaaaaggggtgtttttggaggaggaggaggaggaggaggaggaggaggaggcggttgttttaggttgtagatgaatttgtttattattgagtagttggagaattttaggaaaattaggggaattgtggttggggtaggcgtgggttggggaaggatatcgagagtagtttgggtcgtttttttgtttcgcggtttttagtacgagttttttcgatagaagaggaaaacgcggcgcgattcggttgggggatagcgttgagatgcggatagatgcggacgttttgtcgtcgtttgtaggtagagggattcggagattaggtcgtagaagtagaagaaggtagacgggaaggaggaggaaggaaaggagttttgtggtttcgtgttcgattttttcgtttttggttcgcgtgtttggagttagttttatcgcgttcgcgttttttttcgcgggattttttttggttttgggtttgtagcgggttttgtcgagttttttttttttaggtagtttttttttttttggttattttcgggggtgaggggggttatcggtttttagtgatttttattttttttgtttttttacgttttatgttttttatttttttgttttagttgtgtaattttgagtaaattttttaatttttttaattttgtttttgtaagtatattttataggtgtagtgatattatatatttttttcgtgagtgaggattaaatgagacgatgagtatgaaatatttagtttaatgtttggtatatagtttttaagaaagtaggaattgttatgattagatttattggtttgaaatgttttttttttgttttttatattgattattagtagagttattatagggtaagttatgatagaaaaggagaaaaacgtatgagttgtttgtaaaatgtgtttttaaatattgacggttatttgagagttattttatttgtgatatttgtgggatttttttttgttttattttggtagaaattggttgaatgtgagagtgttatattataaaaatcggattgttgatttttttttaatattttgaaagttattatttaattaagtaatttttttgtttatatgtggtattttgtttaatattgtagtgtgatatttaattgggttatattttatttaattaaatgttatttattagtttacgttttggatattttgtaggtagagatattattttttttgaaagtgatatatttagttttttagtatagtaattagtttattattttaggtttttatgttagtaatataagagtttttattgagttaaaagagttttaatattagttttgttagtttatagttaaataaagttaattattttagaattttgttattgaaggttatgtttaattttatttaggcgtttaaaaaatttatggttgggaatagtggtttatatttgtaattttagtatttagggaggttgaggtaggaggatcgtttgagtttaagagtttaagatgatttggataagatgtttagattttgtttttataaaaaatataaaaattagttgggtgtggtggtatgtgtttgtggttttaattatttgggaggttgggatgggaggattgtttgagtttgggaggtcgaggttgtagttagttatgtttgtatttgtgtattttagtttgagtaataaaattagattgttttaaaaaaaaaaaaaaaaagaatttatgttattgtatgtatttttgtgtggtataaaattatcgtagtaagttaagttaaattatatagttaattagatatatatattatttaagttagttaaaggtgtaatatttttttggtataatttttatttgttttataatatgtattatattgttttatttattgtagttttgtaattttttaaatgtaataaaagttttttttattttataaaattattttaaattaaattagagatgatttcgataagatagtaatattttagtagtattaataatattaataatatgttttatttattttaagtagtattaataatttgttttattatattttaagtattttattttaaattaagaaataggtcgggtgtagtggtttatgtttataattttagtattttgggaggttgaggtgggaggattataaggttaggagatcgagattattttggttaatatggtgaaattttatttttattaaaaatataaaaaaaaattagtaaggcgttgtggtaggtgtttgtagttttagttattttggaggttgaggtaggagaatggcgtgaattcgggatacggagtttgtagtgagtttagatcgtgttattgtattttagtttgggcgatagggcgagattttattttaaaaaaataaataaataaataaaataaaaaaaaaataaataaataaataaattaagaaatagattttattttattttgattgattataggtttaattttgaatattttaagtagttaaatattttgaggttaaatagtatgaaggtttaataattttaaataggataaaggagatatttagaaagagaaagtttttaaaataagttttttataaaatattttttcgtttttttagggcgtattttagagggaatttttttcgtgggatatttattgtttatatttgttttttgtttgaaagatttatttttttaagatttagtgtcgttatttttattttaaatatttaaattagtagttattattagatatatttggtgtttgtgatgttagtaggtgttttgaggtttgggaaggagtaaattgtttttaaatttggaataaagaaaatgagtaggaaattaaagaggaaggaggtagagtaaggagaaggaagtacgaattataaggagaggcgggtgttagtagttatcgattttgtttattttttttttttgttttgttttttttttaggtggtatttatttatatgttaaggtttattaatagttgtttttaattttagattatttttaatattgtgtagtttttaggataagagtataaatagaggtttgtttattatgtgtttaaatatttagaaattgtttattaatttaaatacgttgttaagtatgttttgtttagagtagagatataaatatataaatataatgaatatagagttgcgtttgtgattgggtgtttggcgtacggtgttggtatagggatgtattaattcggttttatttgttttttggatttatattgttaggtttgggtgaagatttttttatatttttggatttatgtttttgaaattttatttgagggtgatatcgtgttgtgagagttgtgagttgtgttgttgtttttaagaacggtagggagggtgtgagttatagaagtattaggtagataaaaggtaagtagatttgttaaatttattttagatattaagggtgtaatagatttttgtataatttattattatgtaagaatattatagatagtggtatttttttatagttttaagtattttttttttttttttttttgagatagggttttattttgttatttaggttgtagtgtagtggtgtaattttggtttattgtagtttttgtttttagggtttaagggatttttttgttttagtttttcgagtaattgggatt

SEQ ID NO: 435 - DNA, 8663 bp, Artificial Sequence
  chemically treated genomic DNA (Homo sapiens)
ttgcgttgttggggtttagttttttttggaaagagttaagtggtagatagaggaggtggtagttttgttgggagtatatttagtatttatattgttttatgggttttttttatagaatagatattgttttttttaggtgtaggttataaaggtggacgttgtttgtgttattattttatttattttttttgtggggattatgattaaatttgggaatttgatggagtttaaattaaaattaagtgtaatttaggttattttttgttgttttttttttgtaattttatttataatataagtattatagagtgttttatttttataattttttgattgatggaagtgaagtgttttagggtttagtgttttagaaaagtttaagagttttagaaaaagggattttttttttttttaattttttttttttttttttttgtttttttttttttttttttgagacggagttttatttttgtcgtttaggttggagtataacggtgcgatttttgtttattgtaatttttgtttttttggtttaagagattttttcgttttagttttttgagtagttgggattataggtattcgttattaaagtcggttaatttttgtatttttttttttttttagtagagatagggtttcgttatgttagttaggttagtttcgaatttttgattttaagtgatttatttattttggtttttcgaagtgttgggattataggtatgagttatcgcgttcggttagggtttttttttttaatgtgtatatggtattatatggtggttttttaagtttttttttagagtttttgtgcgaatggtttagtagttttgtttaatatggttataaagagttatttaggaggagttattgaaagttatggggtgttgttttatttgtgtatgatatagagttttttaagtatagagttatttaaagagagtggattgtcgtgggaggtggttttttattaggaaaattatttaagtatgggttagaaaattgtttggttagaatattatagaagaaatttaagatgattggattaggtggtgttgttgttttttaattttgagatttttagagttgaatgttattttttgggttttattgtggatattgtggtttgtagaaaataatttttaatcgtttttatatatatttaaaagatgtgtgtatgaaggagttggggagatagtcggggtaggaagtagtttggatatgttttatttatatagtaaattttttttattttttattattattattttgttttttgttagttttttttgggaggtattgagattgttttggataaagaaaatggatatatggtggggatggtggagaagaaagagagggtattattttagttggttatgatattattatgtttgagttatgtattagaataaagagaagataaaaagttaggtaggttatgtagtgtttagtattcgatggggtagagtttaatggatgatgaaacgaaaaatagtaagataagggtgtgtacgtataagtatatgtgcggttgtggttggcggatatataggtatatttttttttggaaaagtttaatatttggttgattttgtgtgtggtaattttaggaagaagaagaattgttttttattttgtggggaaatagtttagttttttatttttttttagaaggagtaggaattttggaataatgttaataattagaaagtttagtttagattattttagttttaatttggtagagagaggattttttttttggggtcgattaggggttatattttttgtgttttttttgtttattggtatttgaggatgagtgagttttatttattgaggtatgaatgttgtggtttatttggttaatgagggattagggagaaagttttattttatttaaggtttttttttttggcgtggtttatatttgtaattttagttatttgagaagttgaggtggaagattgtttgagtttaggaattagaggttgtagtgagttgtgattgtgtaattgtattttagtttgggtaatagaggagattttgttttttaaaaagaaaaaaaaatagtgttttttatgatgggaattttagttttggagttgtatgtttttagagttagaaaagatattagcggttagattttttgtttattttatggttttttttagagttatagttttattatttttaggagggtttagttaatgtggagttaaattgagttatgagggattttgatttttgtttttttagggttttgtttaggatatttggtaattgttattttgtaagattgtcgtaggcgagatggtttcggggatgtttatttaatagaagttgtcgtaagatggggtcgtttgtggtgtgggttgataggtagacgtgtaggagaggtaatggttgtggttttagtgattggaaggaaacgtgttatttttttattttttgttaaggtaaggttagtattggggttagggttaggtagggtttttgatgtgggatgtaggttttggagggatggaagttaggggttttttatagagttgagtttttttttttttgtttttttgaagtttagtgttgggggtttggtatttttaaagtagggttaggagagggttgttttggggacggttttagtaaaagtagtgggatgttttgtgtatttagaatatgaattgttggtggggtgggcgtgtgacgtggtagagggtaggtattaagtagtttttttatttgtttttttttttattttatgtttttgttttatttttttataggtttgtatttggatttagaggttgaatttaggatattttttttaaaaggatcgtttattattggaaagtcgagtgaggaggagaggtttatttattgaatgggatttttttagatgagaggggttgggtgatagaaagtggatggaatttggttgaggtttgttattttttggtttggggatttttggaaggaaaagaataatttttaggttttttttttatgatttggggattgttttttgtattgtttttgatttagtggaagtgaaaggtgtttacggtttagggttgtagaaatgatttagagttaagttatttagatttaaatttagttttaaagataattattttttttgcgttttagtttttatttttaagataggggtaataaagtatttattggaggaggtttttatgagagtgaagtgagtgaggatataggaaaattatggagtagggtttagtgcggagtagtaggtatttgttttgatgattgttattgtaaaaggatttagttgggtattataattagtttgtttttatttggttttaggaattattatttgtttagttgtgggattttgggtaagttatttagagtgttttgaaatttggttttgttataagtaggattgttttttgttttatagaattgttgtgagggttaaatgaaataatgtatgtagagtttagtaggtttggtatgtagtaaatatttcggaaatattttttttaagttttagggtggttgtttatttggatgttatttttgatttttgaaaattatagggattgaggataggaaagtagtgtttttttttgtatttattcggtttttattttatttttttgagtattaggaaaggagtttgaggaattaataaggttagaggaggaattttgtagagcgtggttagttgggaaggatttgggtagtaggagtagagggggtaaaggagggtttgggttgggggtacgtggtagtatgtttgtttttagtagatattttttattgtttatgttttttgtgggggtgggttagtttagtttaggttattttggtttattgtttattagtgttttttttagatgttttttgggagttggtagtattggagggggtggtaagtggttttagtcggtttatagttttaggatcgggtttaggttttggaagttttttgagtttttttttttttttgtttaggttattggaagatagaggtttttaaagaaagataaaagttggggtttagatatattttatttggggtttgatttaaaggtttttgttagggttattttttgttggtattagagaaggaaagaagtgtgtgtttgtgtgtttgtgtgtgtgtgtgtttgtttgtttgtttatgtttgtaggtggataagtagggtcgggtgtgagtggaagtggaaaggatattattttgtttatttttttttgttggttttttagttagttgttaagatttagagtttgggtagtagagttaattttattgtagttgggggtgttgagtatgtttggggaagagttaaaagtggtagaaaatattttgtttgaaagtaatgttttgttgtatttaatttttgtaatatttgtttcgtttatattcggtttttatagataggagattttagatatttgtttttgaagttgttttaagaggttaaggttgtgggttgttatttaagtttgttttatttttagtttttgtgcggtattttttttgttttgtttggggtagtcgttttttcgtttttagtagtaggatatatggtttagttgttttgttttttgagttgtttataatttggagatggagggggtagtgagagtgtgggtttttttaacgaaaaggtttttttttttttttgatattttgggttgtgagaggagaaggagtgtttaggcgggaggttgtttttttttgtttggggttggttgtcgttatcgttttttattgtttttgttattttttgtttcgagggagggttattttggttgttgtttagtcgttatttttatatttttgttagcgatgatatggtatgtttgtttttaataagttatttttgtttgtagttattgatttggggattaaagtttttggaaagagtttttcgtgtttatttttttagagattggggaggcggttagcgtttcgttttagataaaaggtttttttttttttattttagaagtttttgggtttgaagtgtttgtgagattttatagaagagtatttttgggttttatttatttgttttttgtttttttaggtaggtgtttttttattagtcgtaatttttttggttttttgtttttaaggggcggggtgggggggaggggtataagaaggtggtgggtaggggaaggaagggatattatttaggattttgtaaggtgggtttcgggttagtagagtttgtaattgagatgtatgagtgtgtggggtgcgggtgggagtttagagaagggtttaggagatggggtttgttggttttagttacgattttggttgggtttttttgtgcgtttgatgttttttatttagtttttattttttttttttttttgttgttttttttagtttttgtttgttatttttgggatttttagtttttaagttatagaggtttggatatttttatatgtggattttggttttgggcgttggttttttgatagtagtaaataattttaagtagggttgggttttttgttagtttttttgaaatggttttatttattgtgggtttttggttgtttgatttagtttttttagtttttatttttagtatagagattttttgatgttaaggtagtattttattttattgtaggattgtttcgttgttgtgttgtggtagtatgttgttttattcgtttgtattatagtatttttaaatgagtttatgtgatgttgaatatgtgttgattgatttaatagatatttttttttattttttatttgatttttttgttttttacgaaatttatcggatatttgggagtttggatgatttagattttgtagtaatattacgatgattcggagttgtagtattttagttgatttagggttaagttataagtattttggatagttttttttattattttataatgatattgggttttcgggatgttggttatattttgaatgtgtgttatgttttaaaatttgtaggtattagtttggatttgggatggtttttggggataatgttgatagatttataagtattttttttatttttaattgttttttaaattatgaaacgttttgtatatttagaagggtatgtaaatatagatatataaaatatagatgtagtgttttgttaataataataagaagaagatattatatgtttattatttaaaaaatagaatattgttattatataatgtatattttttttcgattttatttttttaaaggtttttgttaattatttttttgttttttttttttgaattttttttataggtttagggggtatttgtgtaggtttgttataaaggtatattgtaagatattgaggttttgagtatgaatgaattgttttttaggtagcgagtatagtatttaataggttgttttttagtttttgtttttgtttatttgtatttttagtgtttattgtttttatttttatgtttatatgtatatgatgtttagtttttatttataagtgagaatatgtgttattttgttttttgtttttggttttgtttttttaggataatggtttttagttgtatttatgttgttgtaaaggaaaaaggatagtgtatgtgtgtaaaaaggatagtatacgtgtgtaaaaaggatagtatatgtgtgtgtatatatatatatatatatatatatatatatatattgtattttttttatttagtttagagttgatgggtatttgggttgattttgtgtttttgttatcgttgtaatgatttttgttttttttttgaaagtgtttttttttttatatataggtatatatttatatttgttaaattttaatgtatatgtagttgttaaaatttaatatatatattaaatatgtatttatatatttaatatatattaatatataatatatattaatatgtatttatatatttaatgtatatattatatatatattagagtttagtaagtataaatttagttgtgaaagaaattagtaatagtgttattattattattaggatagtttaaaagtaattgcgatttttgttattatttttgatggttaaaattataattatttttgtattaatttaatatattaaggtttttaggaaaagaaaagttaaatgaggttagggaattttcgaggtttgtgatcgggattttttttgtttttttgggattgatgataatatatttttgtttatttgtattattttttttttttggtgtgaagttttttggggaatttttagaaagtatttgttttatttatttggtagtagtggtttttagatatattttaaggtttgggtttttttgggttttatttgtaaaggggatgatgataatagtatttatattatgaagtggtatgaaggtgaaataagatttaatgagttttgatattttatattttagattagagattatgggtttagttattgaaaagtagtttagagttttttaagggtttttagaatttgtttttgttatttaagggtaggaggaaatggtattttggggtggagtgggtttttgttttttgttttttggtttttttttttattttttttttgataagaaggattttttgtttagggttaaaggggttattgaaatttgtaatgatttttttgaggatttagataaaattgggagaattgggaggtagtagggtttgaaagtattttagggtagtttgaggtattttagaattatttttgagtttgatagtagacgggattagacgtagtagataaagttgggggtttagttttggttaatgaaagagttaagttagttgttttttgagaaggtttttttaaagttgtgggttttcgtttcgtttgttttttttttttttttttaagtatgaaatttatttttagatgataatgtttgtttagaaaaattatttttgaaaatataattaattgtataggatttatatgatttagaaggatatttaaaataatgttttaagtgttattgttaaaaaaaggggggggaaatattttgaaatgttgattgttttggtataggaatattaggggtataagtttattagttttgagttttatggttgtgaggagttggggttggaatgattagggtatttaaatttttaattttttttatttttaagaggaggagatttgagggtttttttttatatgtaggtgttgaggttgagggaggatttttatttttttttggagggggcgttgggtaggatagaagtttttgatttggtttaggtttgtgtttgaggtagagttagtgttagtagtatgaatgggtttatgtatatgatttttatattttggaagtaaaatattttttttaatgtagatagcgggggtatgtagaggtgaattattaaatttaaattaatttgatagatgtaatatttgaaattaggtagttgattttaagttatgttttgagttagttatgtagggcgaattatgtatgagggtttcgaaggtattgtgtttaggtttgggttttggggagatgtttatttttgttgagttttttggtggtggggggtgggggcggtgggatgaggttgggggtgggtggtattaaggatgttagttggttttggtattgattttggttttgatcgtggtttgtttgttgtttttatagg

SEQ ID NO: 436 - DNA, 8663 bp, Artificial Sequence
  chemically treated genomic DNA (Homo sapiens)
tttgtaagaatagtaagtaggttacggttagagttagagttagtgttagggttagttggtatttttggtgttatttatttttagttttattttatcgtttttattttttattattagggagtttagtaagggtgggtatttttttagggtttaggtttgagtatagtgttttcggagtttttatatatgattcgttttatatagttggtttagagtatggtttggaattagttgtttggttttagatgttgtatttgttaggttaatttgggtttagtggtttatttttgtatgttttcgttgtttgtattggaagaggtgttttatttttagggtgtaaggattatatgtatgaatttatttatgttattggtattagttttgttttaggtatagatttgaattaggttaggggtttttattttgtttaacgttttttttaagggaaaatgagagtttttttttagttttagtatttatatgtggagagaaatttttaggttttttttttttgagggtggggggaattgaggatttaggtgttttggttattttagttttagttttttataattataaagtttagggttaataggtttatgtttttggtgtttttgtattaagataattaatattttaagatattttttttttttttttttggtaataatatttaaaatattattttgaatgtttttttgagttatgtgagttttatataattaattgtgtttttagagatggtttttttaaataggtattattatttagagatggattttatatttgaggaaaaggagaagagatagacggaacgaaagtttatagttttgggaaggtttttttaggaagtagttggtttgatttttttattagttaaaattgggtttttagttttgtttgttgcgtttgatttcgtttattgttaggtttagagatgattttgggatattttagattgttttgaaatgtttttagattttattgttttttagtttttttaattttatttgaatttttaaaagggttattataggttttagtgatttttttgattttaggtaaagggttttttttgttagaagaaaaataagagagaaagttaggaaataagagataagaatttattttattttagggtattatttttttttgtttttgggtgatagaggtagattttgggggtttttgggaggttttgagttattttttaatgattaggtttatgatttttgatttagggtgtggaatattaaagtttattaagttttattttatttttatattattttatggtgtagatgttattattattattttttttataaatgaggtttagagaggtttaaattttaagatatgtttagaaattattattgttaaatgaataaaataaatattttttaaaaattttttaaagagttttatattaagggaaagaagtggtgtagataagtaagaatatgttattattagttttaaagggatagagggaatttcggttatagatttcggagattttttaattttatttagtttttttttttttggaaattttaatgtattaggttggtgtaaaagtaattgtggttttggttattaaaaataatggtaaagatcgtaattatttttgaattattttaatagtaatagtgatattattgttaattttttttatagttagatttatatttgttaaattttaatgtatatataatatatatattaaatatataaatatatattaatatatattatatattaatatatattaaatatataaatatatatttaatgtatatattaaattttagtagttatatatatattaaagtttagtaagtataaatatatatttatatataaagagagaagtatttttagaaagagaataaagattattgtagcgatagtaaagatatagaattaatttaggtgtttattaattttggattagataaagaaaatatagtatatgtgtgtgtgtgtgtatatatatatatatatatatatatatattgttttttttatatacgtatattgttttttttatatatatatattgtttttttttttttgtagtaatatggatatagttggagattattattttaaggaaataaagttagaaatagaaaataaaatagtatatgtttttatttataagtgggaattaaatattatgtatatatggatataaagatgagaataatggatattgggaatataagtggataggggtaggggttgaaaaataatttattgagtattatgttcgttatttgggagataatttatttatatttaaaattttagtattttgtaatatatttttgtaataaatttgtataggtattttttgaatttataagaaaagtttagaaaaaaagaataaaggaatgattaatagaaatttttggagagatgagatcggggaggggtgtgtattatatagtagtagtattttattttttgagtagtgagtatatggtattttttttttattattattagtaaaatattatatttatgttttgtatatttgtgtttgtatgtttttttgaatatataaaacgttttataatttaaaaaataattaaaaatagaaaaagtgtttgtggatttattaatattgtttttaaagattattttaagtttaagttgatgtttgtaggttttagaatatagtatatatttaagatgtggttagtatttcggaggtttaatattattgtggggtaataggggaaattgtttaggatgtttgtggtttaattttgggttagttgagatgttgtagtttcgagttatcgtggtgttgttatagagtttgggttatttaggtttttaagtattcggtggatttcgtggaaaatagagaaattaaatggggggtaggaaggaatatttgttaaattagttaatatatgtttagtattatatggatttatttggagatgttatgatgtaagcgagtggaataatatattattatagtatagtaacggggtagttttgtaatggggtggggtgttgttttgatattaggaagtttttatgttgggggtgaaggttggaaaggttggattaagtagttagaggtttatagtgaatgagattattttaggggagttgatagaagatttaattttgtttgaggttatttgttgttattaagaagttagcgtttaggattagagtttatatgtggagatgtttaagtttttgtggtttgagagttgaaagttttaggaatgataggtagagattaaagaaggtagtaaagagaaagaggagatgggggttggataggaaatattagacgtataggagagtttagttagggtcgtggttggagttagtaagttttattttttgagtttttttttgaatttttattcgtattttatatatttatgtattttagttgtagattttgttggttcgggatttattttgtaaaattttgggtggtatttttttttttttttgtttattatttttttatgttttttttttttatttcgttttttgaaaatagaaagttagggaagttgcggttgatgaggaaatatttatttgaaggagtagggggtaggtaagtggagtttaggggtgtttttttgtgaggttttatagatattttagatttaaaggtttttgaaatgaagaaggggaaattttttatttaaggcggagcgttgatcgtttttttagtttttaaggaagtgggtacgagaggttttttttagggattttagtttttagattagtgattgtaaatagaagtggtttgttgggagtaggtatgttatgttatcgttggtaggggtgtgggggtggcggttgggtagtagttaggatggttttttttcgaggtagggagtagtaggagtagtgggaagcggtggcggtaattagttttaggtagaaggaaatagtttttcgtttaggtattttttttttttttatagtttagggtgttaggagggaggaagggttttttcgttagggagatttatatttttattattttttttatttttagattgtaggtagtttaggaagtagagtaattgggttatgtgttttgttgttaagagcgggaagacggttgttttaggtagggtagaggaggtgtcgtataggagttgggaatggggtaggtttggatggtagtttatagttttggttttttgggatagttttaaaggtaggtgtttgagattttttgtttgtggagatcgggtgtaggcggagtaggtgttgtaggggttaaatatagtaaagtattgtttttaaataggatgttttttgttatttttagtttttttttagatatgtttaatatttttagttgtagtagggttgattttgttgtttagattttggattttagtagttggttggggggttagtaaggagggatgggtagaatagtattttttttatttttatttatattcggttttatttgtttatttgtagatatagataaatagatagatatatatatatataaatatataaatatatatttttttttttttttgatgttaataggaggtgattttggtaaaggtttttaagttagattttagatggggtatgtttagattttagtttttgtttttttttggagatttttgttttttagtggtttaagtagggaagggggagagtttaaggggtttttaagatttgggttcggttttagaattgtgagtcgattgaggttatttgttattttttttagtattgttagtttttagggagtatttgaggaaaatattagtggataatgagttaagataatttaagttgggttggtttatttttataagaagtatgggtagtgggaggtgtttgttgaggataggtatgttgttacgtatttttaatttaggtttttttttgttttttttgtttttattgtttaagttttttttagttgattacgttttgtagggttttttttttggttttattgattttttaggttttttttttggtgtttaggaaggtgaggtggggatcgggtggatgtagaaaggagtattgtttttttatttttaatttttgtggtttttagaggttagaggtgatatttagatagataattattttggaatttaaaaaaaatgttttcggagtatttattatatgttaggtttgttaagttttgtatatattattttatttagtttttataatagttttgtgaggtagggagtagttttatttgtagtaaagttaaattttagagtattttgagtgatttatttagggttttatagttaggtaagtggtggtttttggggttaaatgaggataggttgattgtagtgtttaattgggtttttttgtaatgataattattagagtagatgtttattgtttcgtattgggttttgttttatggtttttttgtgtttttatttattttatttttataagagttttttttagtgggtattttattgtttttattttaggggtggaaattgaggcgtagggaaggtgattgtttttggagttggatttgaatttaggtagtttagttttgagttatttttgtaattttaagtcgtggatattttttatttttattaagttaggagtaatgtagagaataatttttaggttatgagggaagaatttggggattgtttttttttttttaaggatttttaggttaagggatggtaggttttagttaggttttatttattttttgttatttagttttttttatttgggaaaattttatttaatagatgggttttttttttttattcgattttttaatagtggacggtttttttaggagagatattttagatttagtttttaagtttaagtgtaagtttataggaaagtggggtaaagatataaggtggaaaggaggataggtggaaaaattgtttaatatttgttttttgttacgttatacgtttattttattagtaatttatgttttgagtatatagaatattttattgtttttgttgggatcgtttttagagtaatttttttttgattttgttttagaaatattaaatttttagtattaagttttagagaagtagagggggaggagtttaattttgtagaaagtttttggtttttatttttttagggtttgtattttatattaaaaattttgtttgattttgattttagtgttgattttgttttagtaagaaatgagaagataatacgtttttttttagttattgaagttataattattgttttttttatacgtttgtttgttagtttatattataggcggttttattttgcggtagtttttgttaaatgggtattttcggggttatttcgtttacggtagttttgtagggtggtaattgttaggtgttttgggtagagttttgggaggataaaaattaaagttttttatggtttagtttaattttatattgattggatttttttaagggtggtaaagttgtgattttgagaaggattatggagtggataagaagtttgatcgttaatgttttttttagttttgagagtatgtaattttaagattggaatttttattatgagaagtattatttttttttttttttaagagataaggttttttttgttatttaggttagagtgtagttgtataattatagtttattgtagtttttaatttttgggtttaagtaattttttattttagttttttaagtagttggggttataggtgtgagttacgttaggaaagaagattttaaatgagatgaagttttttttttgattttttattagttagatgaattataatatttatgttttagtgagtgagatttatttatttttagatgttaatgagtaggaagggtataaaagatgtggtttttaatcgattttaggagaggggttttttttttgttaggttgggattggagtgatttaaattgggttttttaattgttgatattgttttaaagtttttattttttttagaaagaaatggaaagttaagttatttttttatagagtgggagataattttttttttttttaaaattgttatatatagagttaattaagtgttgggtttttttaggagaagatatgtttgtgtgttcgttagttataatcgtatatgtatttgtgcgtatatatttttgttttgttatttttcgttttattatttattaaattttgttttatcgagtgttaagtattgtatgatttatttaattttttgttttttttttattttggtgtataatttaggtataataatattatggttagttaaggtgatatttttttttttttttttattatttttattatgtatttattttttttgtttagaatagttttagtattttttagaagaagttgatagagaatagagtgataataatggggagtggagagggtttattgtataaatagaatatatttaaattattttttgtttcgattgtttttttagtttttttatatatatattttttaaatatgtgtaagaacgattggaaattattttttatagattataatgtttatagtaaaatttaagagataatatttagttttgaaaattttaagattggaaggtaatagtattatttagtttaattattttaaattttttttatgatattttagttaaatagttttttagtttatgtttgaataatttttttagtggagaattattttttacggtaatttattttttttggatggttttatgtttagaaagttttgtattatgtatagatggaatagtattttatagtttttaatggttttttttagatagttttttgtagttatgttagataaagttattaggttattcgtataggagttttagaggagggtttagggggttattatatggtattatatgtatattagaaaaaggagttttggtcgggcgcggtggtttatgtttgtaattttagtatttcgggaggttaaagtgggtggattatttgaggttaggagttcgagattagtttggttaatatggcgaaattttgtttttattaaaaaaaagaaaaaatataaaaattagtcggttttggtggcgggtgtttgtaattttagttatttaggaggttgaggcgggagaattttttgaattagggaggtagaggttgtagtgagtagagatcgtatcgttgtattttagtttgggcgataagagtaaaatttcgttttaaaaaaaaaaaaaaaaaaataaaggagaagaaaagaaaaattaaaaaggaaaaggatttttttttttaagatttttagatttttttaagatattaagttttaagatattttatttttattagttagaaaattataaaaatagaatattttataatgtttatgttgtgagtgaagttgtaggggagaagtagtagaagatagtttgggttatatttaattttgatttagattttattaaatttttaggtttgattatgatttttataagaagagtgagtaaggtggtagtatagatagcgtttatttttgtggtttgtatttggagagaatagtgtttgttttatggaaagggtttatggagtagtgtgagtgttgggtgtgtttttagtagggttgttattttttttgtttgttatttggttttttttagaggaggttgggttttagtaacgtag

SEQ ID NO: 437 - DNA, 8370 bp, Artificial Sequence
  chemically treated genomic DNA (Homo sapiens)
tttggtttatgtgtatgtgaagagagtatataattagaggaataaaattattatttagattgtattgtgttgtgatttttttttttaaaaagaaaatttaggttaaattttattttatttttgtaaagggtaaattatttttaattttatttttgagtttagataaatattatttattttagagttaatgaatgttaggaatagaagaatcggtttattttttattattgtatttttaaattatttatatgttttttgagggaaaggcgtaattttttttatttaattttgtattttttttatattttgtattcgatataatgtttgtttttatataatgttattttgtcgtagttttttttttttttttttttcggagatagttttgttttgtcgtttaggttggagtgtagtggtataatttcggtttattgtaatttttttttttaggtttaagtgattttgttttagtttttttaatagttgggattataggtacgcgttattatgttttgttaattttttgtatttttagtagagatagggttttattatgttgtttaagttggtttcgaatttttgattttaggtaattcgttcgtttcggttttttaaagtggtaggattataggcgtgagttatcgcgttcggttaagtgttatagttttttgtgtagattaagtagtggttaataaattttgtagaaattaaagtatttatttgtttttaattaggttaagattagaatagcgtgatttgtaagtaaaataatagttatttttttaaatattaaagttaaagtttttttgttgtgtaggtgagatgaaggggtttaaaagtgaagattaaatttattttaaagtgtaaagagtatttatttatttattattgtagtaacgttgtaacgtgaataattcgattttaaatataaaatagtttaatttagtttttttgtcgtatttatatttatagtataaaatattcggtagggttttggaatgagtattattgcggttaataatttattttataaatattggacgaatttaaatttttattggattatatagaatacgtttttaaaaaatttaaagagttttagatgttataatagggttttattaaatattacgtttttaaattttattattagaatgtgtatttattttaattgtaattattttgtgtttaaaattgtgtattttgttttgtaataggataaattcggtggataaaagttgaaattcgattttgttttaattaagaggttaagaaaaatggagaatcgcgttggcgtggagttgatatagaaatattgtaagggttggggatagggtttagttcgtggaatatataggtagtattattaattcggtttttcggaaaagagaaagtttagtgagaaaggtgaaaattgataaggtatcgtttttcgatttgttgaaaaaaagataatgtaaatagagtagggtttaaggcggaagaaaattagagaaaagtaggtagttaagcgtggcgaatatagttttcggggttatttcggaggggattcgcggcggtcgtagcggggcggaggtcgaagtcgaggtcgtttcggaattagagagttaggcgggaagtgtataaaggtacgaggttacgtttaggaggggcgggttttttggtcggaagggggggggtcggcgcgcggggtcggtcgtttaggtaacgggttcgcgtggcgtttaggttttttagaaagtttaaaattcgggagttttgggagggtagaggggcgacgcgggggagggcggttcggggagttgaatggttttaggacgtcggtcgatcgggtgtttgtatattgtgggcggtttttttaagtgtggggagcggttttcgagaacggtgtttatgatatagggcgggaagagataaggtttagggaaggcgtttttcgggtttatttattttttttggggttcggtattaggaagtagttttttttttaggtttttttgtttttaagtcgttttaaattgagtatcgggagacgatataaagggagggcggtgacggatggcgtaggcgcgggagtcgtttaggttgttgggagtggtggttcggtcgcggaatgggtaggtttttcgcgtattttgcggtcgtagtttaaaggatatcgagagggtgttagtgcgtatgcgtcgttattttcgttcgtgttcggtttttttttttttttcgtttttcggaggatttgggtttttagtagtaagagttcggggggtattatttacggttttttcgttttttttttatcgtgattgggttgttaaagtgatgttggtaagtagattggttattgcggttgttagttttgtttcgggttttatttatattgttttgtggggcggggacgaagagttaggggttgaggagcgagttgcggtagttgttgtgtattatggtttcggaggtttttgtttcgcggttcgttaggttttggtcgggtttttagcgaagtaggtcgtttttttgcgttttttagcgggcgtgttgtgtcgtttaataggttttgtttttaagtgttaaaaatttttagtaaagtttgcgtttcgttcgtcgtttatattttagcggttttgacgttgtttttttcgcgattttcgtttttggaaaaagtgataggtaaggttacgttttcgcgagggtcggtttggagttcgtagtttttagggtttgggacggtgaggggcgtgaatgcggcggggggcggggtcgttgtcgggggagggggtcggggcgtatgcgcgttgcgtagcggggttgaatgttttttaagtgtttgaaattggtatttgggttttttacgttggataagtgcggttcggcggttagcggagcgcgttttttttcgttgttcgtttcgttttttttttttatttagtttagtgggcgagtgggtagcggcggtcgcggcgttgggttttttttcgtcggtgtgtgcgcgttcgtacgcgcggttttcggcgttagtttcgtcgtttgagagggggtttgcgtcgtcggtcggggcgtgcgttcgggagttatcgttatcgcggttcgcgtttttaggcgttggggttttcgcggattcggaggcggcggacgggttcggtagatgtagtcgtcgggtcgaagtaggagtcggcgggggggcgtcgggagagcgagggttttgtattttgtagtgttattttttgaggggggcggggggtggaggaagcggaaagtcgcgtcgagtcgtcggggattttcggggtgaattatgttgagttttgttaacggggagttagttttatttggtgaattatgtggaggattatttggattttatcgagtttttgtttttcgatttgtagagaaatgtttcgttgatgcgggagatcgacgcgaaatattaaggtacggtcgggtgatggatgggcgggggcggtcgtttttttttcggcgggttcgggcgcgtcgcggagtcgggtcggttttgtcgtggatcggaggaagcggtcggtttcgtagcggcggttttcggtaggggtaggaataaaaggtttggagcgtttttgattcgttaaggtttttgtgtgtaaagttcgggatacggaggaggaaggaggcgcgagaggtttcgttgtaaggttgcgcgattaaagcgttttttgtagtgaagtgatgaggcgggtgttgcgggggagggggcggcgggtttaagtcgcgttttttaggagggggtgtagattacggcgcgagatggagggatgtgtcggcgtttggggttatagggcgtcgagacggggttgtaggaggagggcggttgtgggtcggggttttcgcggattcggtgtttcggtttcgggtaacgtcgtttttttggttttttttcgtcgttttttatttagtttcgaatttgagtgttatataaagtatcgggtagtatttcgttcggggtaggtcggtcgttttcgtttagtttttttcggtttttatttggagttggatatcgagtaggggtcgattgcgaggggcgacgtcgtcggttgtagtttgcggaggacgagggtttttttttgtgtgtcgtagggaagggaagggaaggggaggagcggaggcggggaaggcgtttatttgcgttgcgttcgggggggcgcgggtagatcgttggtttggagaggattgtggtaggtgagaggatttgtgcgtcgttttttgtagatttggtcgtttcgggtgttagagagaggtggcgagttcgtgttcgtcgggaattgttggttgttggggaaatttttttgcgaggttagttaaggttttgggggttttgttttgaatgtggattattattcggagtttattaatgtttataaggttgcgtagtagggaaacggaagagttgggtgggggtaaaaaaaaaaattgatcgttattttcgaaagtattagacgtttttgtcgggaaggcgtttttgcgcgttttattcgagacgtagtttcgtagcgaattttataggaattttattagtatattatggaacgtttcgttttagttttttagtagttggttgtgatgtttttcgtggaatgtttttattatttttttgcggaacgattggtcgttgaggcggatgaaggcgggtttagcgtaataattggtatgggtttgtgttttcgttgtttttttttttttttttcggggaggagcggggtggagggtggacgagttgatttgaacgttttcgggtcgttcggtttttagttttggattggtttttttcgttgttggggcgggtcgtgttttttcgttttgcggtgtggttggttttttttttggttttcgttttttaaatcggcgatttttataggcggcggttttcggggtgcggggcgagtttttcgttggttttttttttattggttggaggtttggcgggtgtcgtttttgttttttttttcgtttagttcggttattttcgggcgcggatttatagtagtagtagtgatttcgggtttgtgggttcggggtcggggttgtagttcggatcgtttttcgcgattcgcggggtcggttcggagatagttttaggtcgtatttttgttgattcgagggtggggtcgcgcgtggtcgtggaaacgtgagtgattggggttgcgtttacgagggggattttcggcgtagaaatttttttggaaggtgttgttttcgggtcggacgggtttcgtggggtgattttggggtttcggacggaaggaaggtaggggttgagattattttgatcgttcgacgatagaaaaaagtagcgcggggcggggtgtagggttttagttgtttagatagtaaagtttatggagttattttgtttttttgtcgttgttggggagagtttggtttgttgtttgttttatgtttatttagggtgatgaattttttggttttaggaaagattatagttttgttttttcgggagtattggagcggcgtagttgggagcgtcgagaagcgagcgaatttgtcgtaagggttatagttttttggatttcggtgtaaatgttgagttttgtcgcgtagttttgaaagatttttatagatttattttgtaggaagttaaacgttttttgtttagtaggtattagttgtatgttaatttataaatttggattataattagtttgtcgatttaaaatggtgtttgaggttgtttgaattattttttaaatattattataaaaatatttatttattttttgggaagttcgttttataaagaattttagtgtaattcgtatgtaaaattaaaatatatttaaaataattggataaattaatttaaatgttgttataattttatttaatttgtaaattgtatgtgttgttgttttttatggtaatgttggtgtggaatatgtttggaaaaaaggtagtagtgtttgaagttgagttgttggtattgaaaaagtagagtgtttggaaggatggttttttatttagtagtggtgttgtttttgtttataaatatttgtatttagtggttttgttgataaaatattttgtttggagtattaaagaaatattaggtaatagaaatattttttggtaattttgcgatgggatatttgttttttttgtttataaattaggttttatttggatggaagtttgtttgtgatgtaaaataatttttgtgttattaaattttaaatttatatgatatagttttttgtgaaatgataatattgtttttagaattttgattattgatgaaaagaagtgatattattttgtaattttaaatttatttaaaaataaatggtatatatattttaatattatgataaataagttgaataaattggtattatttggatacgttgaatatagttatttatttttataattaattattatatgagattagggttttttttttggtggtaggtagtttgtattgtttttttaggagtttttaaagttgtttttagtttgagaatatattttggaaaatattattatttagagaagttttagcgttggtttgagtttttatgtttattttagtgttaggtatatgttttataattatttggagataagatttggaaaggaagggggtaatattttagataattttttttatttttagttttttttttagtttataagtagtattgttggttaggtacggtggtttatttttgtaattttagtattatgggagatcgaggcgggcggattatttgaggtcgagagttgggagattagtttgtttaatatggagatattttgtttttattgaaaatatagaattagtcgggcgtggtattatatgtttgtaattttagttattcgggaggttgaggtaggagaatcgtttgaatttgggaggtaggttgtagtgagttgagatcgcgttattgtattttagtttgggtaataagagtgaaatttcgttttaataataataaaaaaaggtagtattgttgttttgtttaaagagattgtaaaaaggttttaggagaataatttggtattgtttaatttaatggttattgtttgaggaaaaagaattttggaatttttgtgtatttaagtagtttttttagtaaggttgtttattttaattagattttttaatagtttttgttttttgagaaattgtttaattatatttgttaaattatattttaaaattatatatattgttttttaatatgtttaggaaggtttatatttaaatattgaagaggtttttttttgtttttgataatattttaaagtttattgattttaatagatgtgaagatgtttttgtttaagtagtagatgtaaaagtaaaatttattagtttcgttttaaagtaaggttagtgtatttattgtagttaaaaaataataataatagtttattatagtggtgtttttgtagttttagttatttaggaggttgaggtgggagggttttttgaatttgggaggtcgaggttgtagtgagtcgagattgtattattgtattttagtttgggcgatagagacggattttgtttttaaaataataataagtcgtaataataataaagtaaagttaggttttttggattattgtggtagaattgtttttgttgttattaatatagagggataatatgttagaataaatgtggggattgaaattgaggatttaagttataaagtattttggatttttattgttaattcggttttttaaattatagagagttattatataaatttatatatatttttttatttaatagggtattttagatgttggtatattaaaataaagaaaataaagattttttttatttgaaatatttaaataatttataatatattttattaatgtttgtatattgtgtataaatgtaataaatattatgtttatataatgttatatgtatattaataattgtatttaaatagaaatatttgagtaaaaatgatggtagtatagatatagttattaatagaaagtattaataaatgttgggtttcgagtattgtattttatttaaacgtttttttttaatggtttcgggcgttgttattcgtgcgtgtttgggaattgtttttaggttttttggggtggttggagcggtttttgtcgttgtggaagttgggtcggtatttgtgttgtgttgtgttgtgttgtgttgtgttgtggttagtataggaatagataggttcgggagagtttgtggttggtgggttttgttttgggtaagtcgtgcgttggtttttaggttttttgttagtttttttcgtagattcgttcggggtcgtgtgggttgtttcggtgttttgttcgcgagtgacgtttgttttttttgtttttaga

SEQ ID NO: 438 - DNA, 8370 bp, Artificial Sequence
  chemically treated genomic DNA (Homo sapiens)
tttgggggtaagaaggataggcgttattcgcgagtaggatatcgggataatttatacggtttcggacgggtttacggagagggttggtagggagtttaggggttagcgtacggtttgtttagaataaagtttattagttataggttttttcgggtttatttgtttttgtgttaattataatataatataatataatataatataatataaatgtcggtttagtttttatagcggtaggagtcgttttagttattttagggaatttgagaatagtttttaggtacgtacgggtgataacgttcgaagttattaagaggaaacgtttaaatgaggtgtagtgttcgggatttaatatttattaatattttttattaatgattatgtttatattgttattatttttatttaaatgtttttatttgaatataattattaatatatatataatattatataaatatggtatttattatatttatatataatatataaatattaataaaatatattataaattatttgaatattttaaataaaaaaggtttttattttttttattttaatatattaatatttagaatattttgttaaatgagagaatgtgtataaatttatataatagttttttatgatttaaagaatcgggttaatagtaaaggtttaggatattttgtgatttaggtttttagttttagtttttatatttattttagtatgttatttttttgtattagtgatagtaagaatagttttgttataataatttagaaaatttagttttgttttattattattacgatttgttattattttggagataaggttcgtttttgtcgtttaggttggagtgtagtggtgtaatttcggtttattgtagtttcgattttttaggtttaagggatttttttattttagttttttgagtagttgggattatagaagtattattgtgatgggttattattattattttttaattgtagtgaatgtattagttttgttttaaagcgaagttggtaggttttatttttgtatttattgtttaaataaaaatatttttatatttgttaaagttaatggattttaaaatgttattaaaaataaaagaaaatttttttagtatttaaatgtaaatttttttgggtatgttagaggatagtgtatatgattttaaagtgtaatttggtaagtgtaattaggtaattttttaagaaataaaagttattaaaaaatttagttgaagtaaatagttttgttaaaaaggttatttaaatatatagaaattttagagttttttttttttaaatagtaattattaaattaaatagtattagattatttttttaaaatttttttgtagtttttttaaataaggtaataatattatttttttttgttgttgttgaaacggagttttatttttgttgtttaggttggagtgtaatggcgcgattttagtttattgtaatttgttttttaggtttaagcgatttttttgttttagtttttcgagtagttgggattataggtatgtaatattacgttcggttaattttgtatttttagtagagatagggtgtttttatgttggataggttggttttttaattttcgattttaggtgattcgttcgtttcggttttttatggtgttgggattataggagtgagttatcgtgtttggttaataatattatttgtaaattaggggaggggttgagagtgggagggattgtttaaaatgttattttttttttttttagattttatttttaaatagttataagatatatatttaatattagagtaaatataagaatttaggttaacgttgaagtttttttaaatggtaatattttttagagtatatttttaaattaaagatagttttgaagatttttagaggaataatgtaggttgtttgttattaggaggaaagttttagttttatatagtaattaattataaaaataaatagttgtgtttaacgtatttaagtaatattaatttatttaatttatttattataatgttaaaatatgtgtattatttatttttaaatggatttagggttataaaatggtattatttttttttattagtaattaaagttttaaagataatattgttattttatagaaaattgtattatataaatttaaaatttaataatatagaagttattttatattataagtaagtttttatttaggtgaagtttaatttgtgggtaagagaaatagatattttatcgtaaaattattaagaagtatttttgttatttaatatttttttgatattttaagtaaagtattttattaataaagttattaagtataaatatttataaataggaataatattattgttaaataggaagttatttttttagatattttgtttttttaatgttagtaatttagttttagatattattgttttttttttaaatatattttatattaatattattatggaaagtagtagtatatgtaatttatagattaaatggggttgtagtaatatttaaattggtttgtttaattattttaaatgtattttaattttatatacgggttgtattgaagttttttatgaagcgaattttttagggggtgggtgggtatttttatgataatgtttgaaaaataatttaagtaattttaaatattattttaaatcgataaattaattataatttaagtttatgaattaatatataattgatgtttattaagtaaaagacgtttgattttttatagagtaggtttgtggaagttttttagaattacgcggtagagtttagtatttatatcgaagtttaaggagttgtgatttttgcgatagattcgttcgtttttcggcgtttttagttgcgtcgttttagtattttcgggggggtaggattgtgattttttttgaagttaaaaagtttattattttaggtgaatatgaagtaagtagtaagttaggttttttttagtaacgataggaggataaagtggttttatgaattttgttgtttggatagttggaattttgtatttcgtttcgcgttatttttttttatcgtcgaacgattaaagtggttttagtttttgtttttttttcgttcggagttttagggttattttacggggttcgttcggttcgaggatagtattttttagaaaagtttttgcgtcgagggtttttttcgtggacgtagttttagttatttacgtttttacggttacgcgcggttttattttcgggttagtagagatgcggtttgaaattgttttcgagtcggtttcgcgggtcgcgggaggcggttcgaattgtagtttcggtttcgagtttataggttcgggattattgttattgttataaattcgcgttcgaaagtggtcgggttgagcggggagaggggtaggggcgatattcgttaggtttttagttaatggggaggaggttagcgggagattcgtttcgtatttcgagagtcgtcgtttatgggaatcgtcgatttggagggcggaggttaggaggagaattaattatatcgtagggcggaagagtacggttcgttttagtagcgagaagaattaatttaaggttggaggtcgagcgattcgaagacgtttaaattaattcgtttattttttatttcgttttttttcgaaaaagaaaaaagaagatagcggaaatatagatttatattagttattgcgttaggttcgtttttattcgttttagcgattaatcgtttcgtaggggaatgataaggatattttacgaaggatattatagttaattattggggggttgaggcgggacgttttataatatgttaatgaagtttttataaaattcgttgcgaagttacgtttcggatagaacgcgtaggggcgttttttcggtagaggcgtttagtattttcggggatagcggttaatttttttttttgtttttatttaattttttcgtttttttattgcgtagttttgtaaatattagtaaatttcgagtggtgatttatatttaaaatagagtttttaaagttttgattgatttcgtaggaaagtttttttaatagttaataattttcggcggatacgaattcgttatttttttttgatattcggggcggttaggtttgtagagaacgacgtataggtttttttatttgttatagttttttttaagttagcgatttgttcgcgttttttcgagcgtagcgtagatgggcgtttttttcgttttcgtttttttttttttttttttttttttacggtatatagagaaaagttttcgtttttcgtaaattataatcggcggcgtcgtttttcgtagtcggtttttattcggtgtttagttttaagtgagggtcggagggggttgggcgggggcggtcgatttatttcgagcggagtattattcggtattttatgtaatatttagattcgggattgagtggggggcgacgaagaagggttagaggaacggcgttgttcgggatcgaggtatcgggttcgcgggaatttcggtttatagtcgttttttttttgtagtttcgtttcggcgttttatagttttaggcgtcggtatatttttttatttcgcgtcgtaatttgtatttttttttagaggacgcggtttggattcgtcgttttttttttcgtagtattcgttttattattttattataaagagcgttttggtcgcgtagttttgtagcgagatttttcgcgttttttttttttttcgtgtttcgggttttgtatataaggattttggcgaattaaaggcgttttagattttttgtttttgtttttgtcgagggtcgtcgttgcggagtcggtcgtttttttcggtttacggtaggatcggttcggtttcgcggcgcgttcggattcgtcgggaaggaggcggtcgttttcgtttatttattattcggtcgtattttggtatttcgcgtcgatttttcgtattagcgagatatttttttgtaagtcgaaaggtagggattcgatggagtttaggtagttttttatatagtttattaggtggagttggtttttcgttggtaggatttaatatggtttatttcggaggttttcggcgattcggcgcggtttttcgttttttttatttttcgttttttttaaaaaatagtattgtaaaatgtaaagttttcgttttttcggcgttttttcgtcggtttttgtttcggttcggcggttatatttgtcgagttcgttcgtcgttttcgggttcgcggggattttagcgtttgagggcgcgggtcgcggtggcggtggttttcgggcgtacgtttcggtcggcggcgtaggtttttttttaggcggcggggttggcgtcgggggtcgcgcgtacgagcgcgtatatatcggcgggagagggtttagcgtcgcggtcgtcgttgtttattcgtttattgggttgggtagaagagaggagcggagcgggtagcgggaaggggcgcgtttcgttggtcgtcgagtcgtatttgtttaacgtggaaaatttaaatattagttttaaatatttgggaaatatttagtttcgttgcgtagcgcgtatgcgtttcggttttttttttcggtaacggtttcgtttttcgtcgtatttacgttttttatcgttttaggttttgggggttgcgggttttaggtcggttttcgcgggggcgtggttttgtttgttattttttttagaggcgagggtcgcggaggggatagcgttagggtcgttggggtgtggacggcgggcgaggcgtaaattttattaggagtttttggtatttggaggtagagtttgttgggcggtatagtacgttcgttgggaaacgtaggggagcggtttgtttcgttgaaaattcgattaggatttaacgggtcgcgggatagaaattttcgagattatggtatatagtaattatcgtaattcgttttttagtttttgatttttcgttttcgttttatagagtagtataagtagggttcgaaatagaattggtaatcgtagtagttaatttatttgttaatattattttgatagtttaattacgatgaagaggaggcggggagatcgtgagtaatgtttttcggatttttattattagaaatttaagtttttcgggaggcggaaggaaggggagggtcgggtacgggcggaagtggcggcgtatgcgtattggtattttttcggtgttttttgagttgcggtcgtagagtgcgcgggagatttatttatttcgcggtcggattattatttttagtagtttaggcggttttcgcgtttgcgttattcgttatcgttttttttttgtgtcgtttttcggtatttagtttggaacggtttggagataaaggggtttgagagggaagttgttttttagtgtcgagttttagaagaggtggataggttcgaggggcgttttttttaggttttattttttttcgttttgtgttatggatatcgttttcggaggtcgttttttatatttggaaaggtcgtttatagtatgtagatattcggtcggtcggcgttttgaggttatttagtttttcggatcgttttttttcgcgtcgtttttttatttttttaaagttttcggattttgggttttttgagaagtttggacgttacgcgagttcgttgtttaggcgatcggtttcgcgcgtcggttttttttttttcggttaaagggttcgttttttttgggcgtggtttcgtgtttttgtgtatttttcgtttggttttttggtttcggggcggtttcggtttcggttttcgtttcgttgcggtcgtcgcgggtttttttcggggtggtttcgagagttgtgttcgttacgtttggttgtttgtttttttttgattttttttcgttttggattttgttttatttgtattgttttttttttagtaagtcggagaacggtgttttgttagtttttattttttttattggattttttttttttcggagagtcgggttggtggtgttgtttgtgtattttacgaattaagttttgtttttagtttttgtagtgtttttgtattaattttacgttagcgcggttttttattttttttagttttttaattaggatagggtcggattttagtttttatttatcgggtttattttgttgtaaagtagagtatatagttttagatataaaataattgtagttgaaatggatatatattttggtggtaagatttggaaacgtggtatttgatggaattttgttgtaatatttaaaattttttggattttttaaaaacgtattttgtgtaatttagtaaaaatttggattcgtttagtatttatagagtagattattaatcgtagtggtgtttattttagggttttgtcgggtattttgtgttatggatgtgagtacggtaaagagattgaattaagttgttttgtatttggaatcggattgtttacgttgtaacgttgttgtaatgataaatggatggatattttttatattttgaagtggatttaatttttatttttaagtttttttattttatttatatagtaggagagttttggttttgatatttggggaaatggttgttattttatttatagattacgttattttagttttggtttagttaaaagtaaatgagtattttagtttttataagatttattggttattatttggtttgtataaaagattataatatttggtcggacgcggtggtttacgtttgtaattttattattttgggaggtcgaggcgggcgaattgtttgagattaggagttcgggattagtttgggtaatatggtgaaattttgtttttattaaaaatataaaaaattagtagggtatggtggcgcgtgtttgtagttttagttattggggaggttgagatagaattatttgaatttaggaggggaggttgtagtgagtcgagattgtgttattgtattttagtttgggcgatagagtaagattattttcggaaaaaaagagaaaaaaagattacgataagataatattatgtggaaataaatattatgtcgaatatagagtatagagggagtataaagttgaataaggaaaattacgttttttttttaaaaagtatataagtaatttaaaagtataatagtaagaaatagatcggtttttttatttttagtatttattggttttagaatgaatagtgtttatttgaatttaagaataaaattggaagtaatttattttttataaagataagatggagtttaatttaggttttttttttaaaaaaaaaaattataatatagtataatttgagtaatgattttgtttttttagttatgtattttttttatatatatataaattaaa

SEQ ID NO: 439 - DNA, 6083 bp, Artificial Sequence
  chemically treated genomic DNA (Homo sapiens)
ttgagtttttttttttcgtcgtcgtgggtttttgcgcggttcgagttttttttacgagcgttattttttgttttatggcgtttagttttattgattatttaagggttgaggagtgtggtatatagcgtagtatttgtaggtagttttatttgcggtaggtgcgggatttattgggtgaagttggttgggtttttgagtttggtggggatttggagaatttttatgtttagttaagggattgtaaatatacgaatcggtatttcgtatttagtttaaggtttgtaaatatattaattaatattttgtgtttagtttagggtttgtgaatgtacgaatcgatattttgtatttatttattttggtggggatttggagaatttttgtgtttattgtatttagttaatttagtggggaagtggagaatttttgtgtttagtttagagattgtaaatgtattaattagtattttgttaaaacggattaattagttttttgtaaaatagattaattagttttttgtaaaacggattaattagtaggatgtgggtggggttagataagggaataaaaggaggttgcggagttaggagtggtaatcggttttggtttttttttagagtatggaggttttgtttttttgttttttgtaataaattttggtgtagttttttttttgggtttatattgtttttatgagatgtaagatttatcgtaaaggtcggtagttttatttttgagttagtgagattacgaatttattagaaggaagaaattttaaatatatttgaatattagaaggaataaatttcggatacgtcgtttttaagaattgtaatatttattgtgagggatcgcggttttatttttgaagttagtgagattaagaatttattaatttcggttatagtatggtgagaaaagggatatttgaattattttaaagtatttttttataatatatttattaattataaaaggaaaaatagtaattttatagtggagaaattcgttagatattattttaattagtgattaaaattaatatgagtagtagtgagatatattaatattatcgagaaggatattatattattttgtaatatttttgttaaaaatatataattttaatttgattatgagagtgtatcggataaatttaaaatggatgatattttataaaagtttgattagtattatttaatagtattatagttataaaaggttaagaaaagtatggagatgttatagattagtaaaaattaaggagatatgaaaattatatgtaatgtgagagtttggaagaaaaaagatatgagtaggaaaattggtgaaattaaaataatgtttgtagattagttaataatatgaattttttggtttttatgattgtataatggttatggaagatgttaatattagggaatttgggtgaagggtattttttttgtaagtaaaaattttatttttgtaatttttttttgtaagtaaaaatttattttaaaaaaatttttaatgtatgtttataaaggaatattaggaaatagtagtagaaaaattttaatcgtaattttgtaattaaaaataattgttggttaggtttggtggtttacgtttgtaattttagtattttgggagttttaggtgggtagattatgaggttaggagatcgagattattttggtttatatggtgaaatttcgtttttattaaaaatttaaaaattagttgggcgtggtggtatatgtttgtagttttagttatttcggaggttgaggtaggagaattttttgaatttgggaggcggaggttgtagtgagtcgagattttataattgtattttagtttggcgataaagcgagatttcgttttaaaaaaaaaaaaaaaacgaaaataataataataaaaaaaatttgtttatgtagatattgatttggtaaaagaaaaaaatttgttaatatgttgatttttttagttattaataatgtaaggaaagtgttttgagtattgattaagtttaaagtatttttttttgagtattttaattttatgtaaaattgttatttttttattttagatattttttttttatttttattgtaagaattaaggaaagaggaaagaaatatgaaagttggtttggtagttaaggataggtttattttagagaggggtagttgtttgagttaggttagaggtatatatttatagattaagagtttttaaggatttagggtgggagagtttaatagaggtttggattgtttttgtgtttttttgttgtgtttatttggaagggagagtttttgtgtttgtttttatatatttttttgtagttttaggtatattttttaagtttgtttttagtttttttattttagtgtatttgaagggaaaagaatgtgtttattaaggtttattgttttattggggtttattttatgagggtgaagtttggtagttgttagagaaatttttcgaatatttttttttttgttcgagttgttttatttgtgttttatttgtgttttatttgtgttttattgtttattttttttggttgtttgtagtgagaagagaaatgatttttttgaaatgtatgaggttagaaagggagttggaatttaaagtggtggtgtttgttcgagatgacggtgtttttgttttgttatttattgtttttttttttattgtagtgttattatttattatatgatgttatttattagtatgttttttgttgattgtttgtttttttttgtttaagcggaagttttgtgaaagtagaggtttttgtttggtttattgagtttaagggtttggattaggtttgggatggaagatgaataagaggttaatttatggattttgaatttttgtaaaatagtttgaaatgatgggaaaaggagaggttttattcgacgttattagagtttttgagcgttggagtattttttttaattgaagtttggattagggttatttagatatatagagagggaggcggttttgtttattggaggaattattgttttcgaaagtgtaatgtttaataaaggtagtggtttatttcggggggttgagatttttgaattttgacgtggttataaagttaattgttataggattggtaatttagaataagaagagtgaaggaagttaatagagatttttggaggttgtgttagtttgtttcggttttgtattaggtattttgtggtttatataatagatattttattgtttaatagttttagtggtagaaattaaagggtttaatagggttgattttttttgagggttgtgagggagaatttgttttattttttttttttagtttttagtgttttttggtaatttttgttattttttggtttgtagaagttttattttgatttttgtttttatttttgtatggtttttttttagtgtgtttgtttgtttttaaattttttatttttgtaatgatatttgttattttggattagggtttattttagttgttttagtgatttttttttaattaattatatttgtaatgattttatttttaaataagattatattttaaggtatcgggattttaatataggaattgagagtaggaaggaggattatagtttaattttttatatagtcgagtattggaggtaaatggtattttcgagaggaaagttgtttgatggtttttgggatagattaggttatgttttagtaattgtttattttaattattattagtttaatataataaaagtttattttttatttatattaagatttttgtgagttgtaggattttttaggataattgtttttcgtgttatgatttttatattttagattgtttttattttttggttttattagtggggtagggaagggttggggagttgtattttatagtttttttgttggagaaatttggaagtgattttttatattagtgtttatgttttattagttagtagtagggttttaggtttttatttttgtaaggggttttagagtgtagggaatagatggaatgtttataagtattatagtttttgttatagtgatttttttaggattggtatcgtagagtgtttatttaaggcggtggaagttaaatttttagtatgtgttggagagtaatgaaaaagatatttattttatgaattaaagttggagttagtgttagttcgaaggttgaaggaaaaagagtaatagatttagggagtatttatttgttttgtttttaaataggtgaggatggggaataaagtgaaggtagtgttttggtgggaattttaaggatagtttttggttttttttaggtttagaagtttatatgagataggggtggaggaaaagaagaaagaagaataagaagagaaagttgaggttttggtttaagttagtgggaagggaaatttatttttattaaattttttttttggtggattgtggggtgtatacgtgaggtttgtataggtgttggaatatggtagaggtttaggatatattttttgtgaatgaatgattgagcggttgaatgaatgagtattattaaaagtttttttttttatttttaaatgttatattgagtagaagggagtaatttttgtttagtaattggtagtttttttgggtgtgtaaatgagtttatagtttgtaatagtagatagtttttgttttttttagaggcgattgtagggaggtggttgatcgttgattatatttagagttggttatgggaatttattttatggaaagattgtaaaattgtttgaaatgtgttttggtattagttattgatacgtaaggttttttaatttttaattttgttttgttagttgatgaggggaaggaaagggattatttaggggtatgggcgattaattttgagtttattaattgattacgtttatttttagttttgtgttttatttatttttaattttttagagggagtagttatttaaggggagtaggagtgtagaataaataagacggtttggggatataattttggagttttttgagaggtaaagagttagcgaagttgatgttttgttaagagtagaatttttgtttattcgttgtttttgagagtggttgtgttgtgtatgtatgtgtatgatttgatatgtatgagagggtgtgtgtgtatgagtgtgttgagtgagtatgtgagtgtagtgtaagagaggatgttggtattattaggtaagtacgagagtgtgtgtatgtgggtataggtgtgttaatatgtatgtgtttgggaatttgtgtatgtggaaggggttagaaggtttagaagagagaggttgatgtttttattttggaggaaaatattgaggtcgagtttttatgggtgttttggagattttaagttttgaatttagtgtggggatatgtaagttatgtttagcgagggatatattttttgattttaggaattttttaggtagttgggaggaatttggttttaattttttaagaatttttagtttgatgaggtataggggaggttttattagtgtattatggggttttttataggtttgagggtttgatgtgtgtgaaattattttgtagagttgggaacgggttaggaggtggttgtgtgtgtgtgtgtgtgtgtgtgtgtgtattgttggagggtattttttgtgtgttttgagtgtgatagaggaagttattttggatttaggttggatgggagagtatgtttgtgtgttttagagttattaaggaggagtaggggagcgacggtcggggtagaagttgagattatttagtagaggagttaggttagtttatttgtatttgttatttaagaatttttattatgaagatttttttattgttggtagtgattatgatttttggtaagagttgattttgatttttgagtatggggggatagttttagaagggaagtatttttgttttttagtttttttttttattgtagtgatttttttttagggggaaaaaagaagttatttgggaggaaggagagtagtagagaggggtagagagggagggcgtagaattttatgttttattattagataatttttaaatttttttttagg

SEQ ID NO: 440 - DNA, 6083 bp, Artificial Sequence
  chemically treated genomic DNA (Homo sapiens)
tttggaaggaaatttgggagttgtttggtgatggggtatggggttttgcgttttttttttttgtttttttttgttattttttttttttttaaatggttttttttttttttttgagagaggattattgtaatgggagagaaaattaagggataagagtgttttttttttggggttgtttttttatgtttagaggttagggttagtttttattaaagattatgattattgttaatagtaggagggtttttatggtaagagtttttgggtgataaatgtagatggattggtttagtttttttgttgggtggttttaatttttgtttcggtcgtcgtttttttgtttttttttggtggttttgagatatatagatatgtttttttatttaatttaagtttagggtgattttttttgttatatttagagtatataaggagtgttttttagtaatgtatatatatatatatatatatatatataattattttttgattcgtttttagttttgtagaatggttttatatatattaggtttttagatttgtggagaattttatgatatattaatgagattttttttgtattttattagattgagagtttttgggaggttggaattaggttttttttaattatttgggaggtttttgaggttagaggatgtgtttttcgttagatatagtttgtatatttttatattggatttaaggtttggagtttttaaggtatttatggaggttcggttttagtatttttttttagaatgaaagtattaattttttttttttaggttttttaattttttttatatatataagtttttaaatatatatatgttaatatatttatgtttatatatatatattttcgtatttatttgatagtgttaatatttttttttatattatatttatatatttatttaatatatttatgtatatatatttttttatatatattaaattatgtatatgtatgtataatatagttatttttaaaggtagcgaatgagtaggaattttgtttttgataggatattagtttcgttggttttttattttttagaggattttagagttgtatttttaggtcgttttgtttgttttgtatttttgttttttttaaatagttgttttttttgggaggttgggggtaggtgaggtataaggttggggatgggcgtggttagttggtggatttaggattggtcgtttatatttttaggtaatttttttttttttttttattagttggtaggatagagttgaggattgggaaattttacgtgttagtagttgatgttaaaatatattttaggtagttttgtagtttttttatggagtaaatttttataattagttttgggtgtgattaacggttagttatttttttgtaatcgtttttaaggggggtagagattgtttgttgttgtaggttgtggatttatttgtatatttaaagggattattaattgttgagtaaggattgtttttttttgtttaatgtggtatttgggaatagaaaagagggtttttagtggtatttatttatttagtcgtttaattatttatttataggaagtatgttttgggtttttattatgttttagtatttgtgtaggttttacgtgtgtattttatagtttattagggagagagtttaatgggggtggatttttttttttattaatttgggttagggttttaattttttttttttattttttttttttttttttttttatttttgttttatatgagtttttaaatttggaaaaagttagaggttatttttgaagtttttattaaagtattgtttttattttattttttatttttatttgtttggagatagggtaggtgaatgttttttggatttgttgtttttttttttttagttttcgggttgatattgattttagttttaatttataaagtaaatattttttttattgttttttagtatatgttaagaatttagtttttatcgttttaagtaaatattttgcgatattagttttaaaaaagttattgtggtaggggttgtggtgtttgtgaatattttatttgttttttatattttagagttttttgtagggatggagatttagggttttgttgttgattggtaaaatatgagtattggtatgaagggttatttttaggtttttttagtaaggggattatgagatgtaattttttagtttttttttgttttattggtagaattagaagatgaaagtaatttggggtgtaagaattatggtacggaagatagttgttttagaaagttttgtagtttataggggttttagtgtgagtgagaaatagatttttgttgtattaagttgatgataattgagatgggtagttgttggagtataatttaatttattttaagagttattaaatagtttttttttcgagaatattatttatttttagtgttcgattgtgtaaggggttggattgtggtttttttttttgtttttagtttttgtgttggagtttcggtattttagaatgtgattttatttaaaaatagggttattgtagatataattagttaagaggagattattagggtagttaggatgggttttaatttaagatgatagatgttattataaaaatgggaaatttggagataggtaggtatattgggagaaggttatataaagatgaaggtagagattagggtgaagtttttataagttaaggaatggtaaagattattagaaaatattggaagttaggagagagggatggagtagatttttttttatagtttttagaaggaattaattttgttgggttttttgatttttgttattggaattgttagataataaaatgtttgttgtgtaagttataaagtatttaatataaagtcgaagtaaattaatataatttttagggatttttgttggttttttttattttttttattttgggttgttagttttatagtagttggttttatggttacgttagggtttagaggttttaatttttcggggtagattattgtttttgttaaatattgtattttcggaaatagtagtttttttaataggtagaatcgtttttttttttgtatatttggatagttttggtttaggttttagttgaaagaaatattttaacgtttaaggattttggtgacgtcggatagagttttttttttttttattattttaggttgttttataggaatttaaagtttatgaattggttttttgtttattttttattttagatttaatttaagtttttggatttagtaagttaaatagaaatttttatttttatagggttttcgtttaagtagaaagagatagataattagtaaaagatatattagtaaatgatattatgtgataggtggtgatattgtaatggggagagaggtagtaggtgatagggtaggagtatcgttatttcggataaatattattattttaagttttagttttttttttagttttatgtattttaaggaaattatttttttttttattataaatagttagaaagagtagatagtaaaatatagataaaatatagataaaatatagataagatagttcgggtagagagggaggtgttcggaaagtttttttggtaattgttaaattttatttttataaaatgggttttagtaaaatagtgagttttaataagtatatttttttttttttaggtgtattaagataggaaagttaaaagtagatttggggagtatgtttgaggttgtagaaagatgtatgggaatagatatagaaatttttttttttagataggtataataaaaagatatagaagtagtttaagtttttgttaaatttttttattttgaatttttaaaaatttttagtttgtaagtgtgtgtttttgatttaatttagatagttgtttttttttaaaataaatttgtttttgattgttaagttagtttttatgttttttttttttttttttaatttttatagtagggatggaggaggggtatttggagtaggaggatggtaattttatataagattggagtgtttaaagagaggtgttttgagtttagttagtgtttagaatattttttttgtattattaataattaaaagaattagtatattgataagttttttttttttgttaaattaatatttgtataagtaggttttttttgttgttgttgttttcgttttttttttttttttgagacggagtttcgttttgtcgttaggttggagtgtagttgtgagatttcggtttattgtaattttcgttttttaggtttaagagatttttttgttttagttttcggagtagttgggattataggtatgtgttattacgtttagttaatttttgaatttttagtagaggcggggttttattatgtgggttaggatggtttcgattttttgattttatgatttgtttatttgggatttttaaagtgttgggattataggcgtgagttattaagtttggttagtagttgtttttaattgtaggattacggttgaaatttttttgttattgttttttaatgtttttttgtgaatatatattaaaaatttttttgagataaatttttatttatagaaaaaaattgtaaaagtggaatttttatttatagaaaaaatgttttttatttaggttttttaatgttaatattttttatagttattgtataattatggaaattaggaaatttatgttattaattaatttataggtattattttaattttattagtttttttatttatgtttttttttttttaggtttttatattgtatgtagtttttatatttttttagtttttgttaatttgtgatatttttatattttttttggttttttatgattgtgatattgttagatagtattggttaagtttttgtagaatgttatttattttgggtttgttcgatatatttttatgattagattgaggttatgtatttttagtaagaatgttataaagtgatatggtgtttttttcgatgatattggtatattttattattatttatgttaattttgattattggttaagatggtgtttgacgggtttttttattgtaaagttattatttttttttttgtaattaataaatatgttgtggggagatattttgagatggtttaaatgtttttttttttattatattgtgatcggaattggtgggtttttggttttattgattttaagaatgaagtcgcggttttttatagtgagtgttatagtttttaaaggcggcgtgttcggagtttgttttttttgatgtttagatgtgtttggagttttttttttttggtgggttcgtggttttattggtttaggagtgaagttgtcgatttttgcggtgagttttatattttataaaagtagtgtagatttaaagagggagttgtattaagatttattgtaaagagtaaaagaataaagtttttatgttttggaaggggattagagtcggttgttatttttggtttcgtagtttttttttatttttttatttggttttatttatattttgttgattggttcgttttatagagagttgattggtttgttttatagagagttgattggttcgttttgatagggtgttgattggtgtatttataatttttgagttagatataaaagttttttatttttttattagattagttagatatagtggatataaaggttttttaagtttttattagagtaggtagatatagagtgtcgattcgtgtatttataaattttgagttagatatagggtgttgattggtgtgtttataaattttgagttagatacggagtgtcgattcgtgtatttataattttttagttagatataaaggttttttaagtttttattagatttaggagtttagttagttttatttagtggatttcgtatttgtcgtaggtggagttgtttgtaagtgttgcgttgtgtgttatattttttagtttttgggtggttaatgggattgggcgttatggagtaggggatggcgttcgtgggggaggttcgggtcgcgtaggagtttacggcggcggagaggggaggtttag

SEQ ID NO: 441 - DNA, 19131 bp, Artificial Sequence
  chemically treated genomic DNA (Homo sapiens)
tataaaatatatttattatgtgttaggttataaatatttgataaaagtaggagggaggaaaaggaaaaggaaggaagaaaaaatttttaaaaagaaagaaaaaagtaagttaatgaataaatggataaatagttttaggataattttgatttaataatagggtagttaataaggtttatattagtttaatgaattagattttgagttatttatttgagttagaaatgtaattatttttaaaaatttaaatataaaatatatattaaaatttgagttgggcgtaggagtttacgtttgtaattttagtattttggaaggttgagacgggttgattatttgaggttaggtgttcgagattagtttggttaatatggtgaaagttcgtttggtttttattaaaaatataataaattagttggatgtggtggtgcgtatttgtaattttagttattcgggaggttgaagttagggaatagtttgaattcgggagaggggaggttgtagtgagttgagatcgtgttattgtattttagtttgggagatagagtgagattttattttaaaataataataataataataataaaaaaatatatacgaaaatatatatattaaagtttgagttagtaaaatttttaaaaagtttaatttttagttattttaaatttggaaaggaagttttaatgtaattgtatataaattttagtgggggtagaaaatatttatttattatttttaggttaagttgtttttgattttttcgtataatattttataatacggaagttaagttatgaggttttttgtttttggtatatagtaggtatatttaagatttttagagaagttgagagaagtagatgttggggattaggatatattattttaaatattattttgggggattagaatatgtttttttaaaatatttttttttggtggtatattttgagttggttattttaagaaattgtagatataggagtagttttgaaaagttgtttttttgtaaaataagtttatgtttataaaggaaatttatattagtaacgtatttatattagagagagggttgttttaagataatttttattatttgagagattttttatttgtatggtaggataatttttttttattatgtatttttttttttgtttttttgtagtttattattattttttcgaaggttttaagttttagttttgtttttttttttgagatggagttttgttttgttatttaggttggagtatagtggtgtgattttagtttattgtaatttttatttttcgggttgaagatatttttttgttttagttatttgagtagttaggattataggtattcgttattatgtttggttaatttttttaatttttttttttttgagattgagtttcgttttgttgtttaggttggagtgttgtggtatagtttcggtttattgtaattttcgttttttaggtttaagcgatttttttgttttagtttttcgagtagttgggattataggtatgtgttattatgtttagttgatttttgtatttttagtagagacgggtttttattatattggttaggttggttttgaattttttaaatgatttatttgttttggttttttaaagtgttgggattataggcgtgagttattgtgtttgtttaattttttgtgtttttagtagagatagggtttcgttaggttggttaggttggtttcgaatttttgatttttagtgatttatttattttggttttttaaagagttgggattatagtcgtaagtcgtaagttatcgcgttcggtattaagttttatttttttttttttttgagatggattttcgttttgtagtttaggttggagtgtagtggtgttattttagttgattgtaagtttcgtttttcggatttacgttatttttttgttttagtttttcgagtagttgggattataggtagtcgttattacgtttaggtaattttgtttttgtatttttagtagagattgggttttatcgtgttagttaggatgattttgatgttttgatttcgtgatttattcgttttggttttttaaagtgttgggattagaggcgtgagttattgtattcggttattaagtcgtatttttttttgtagtttaggatgttttaattattagattttttttggagttttttattttgaggaatttttatgtatatgtatttaattaaatatgatttttttttgttaatttgttttaggttaatttagtttataaattagttaaggaatttagtagggtggagggaagttatttttttgtttttttatagagaaaagtaattaatatttattaagggttttaaagttattgtattatatgttttatattgtgtttatttaacgtttatagttattttgttatttagattaaaagttattaggaggtaatttttttttttttggtggttgttgttgagattgagtttcgttttgttgttaggttggagtgtagtggcgcgatttcggtttattataatttttgattttttggtttaagttatttttttgttttagtttttcgagtagttgagattttgtaattttacgtgttatacgttattacgtttagttaatttttgtatttttagtagagacggggttttattatgttggttaggatggtttcgattttttgattttataatttgttcgttttggttttttaaagtgttgggattataggcgtgagttattgcgtttggtagggggtaattttttgttgggaaagaaaatagttaattaaaggaagtttgggagtatattttttaggggaggatagattgtatttttggttgaggacgagttttggatagttttttgagggttttttgggggtgtgtgtgtgtgtgtgtgtgtgtgtgtgtttttattagtgatttaggttatagttttttgagattttttttttttttttaagatagaattttgttttgtcgtttaggttggagtgtagtggtttttcggtttattgtagttttcgtttttcgggtttaagtaatttttttgttttagtttttcgagtagttgggattataggtacgcgttattatgtttggttaatttttgtatttttagtagagatagtgttttattatgttggttaggttggttttgaatttttgatttcgtgatttgttcgttttggttttttaaatttttgagattataggtatgagttatcgagtttggttagttttttgagtttttatttgaaattaaaataagttttttttttttttaatgggttttagagtttagggtaacgaatattttttggtgtttattattgaattatttagggtatttttggggtggtgatcgtgtttattttagaaattaatatgtttattttagaaattaaattcgggtaatttttgataagtttattaattaaggtttatggtagaatttgagggttaaggggtgtaattagtgtatgggtagaaataagtgttttttttttatattttggcgttgtaggaatttaaagtgattttgtagtaagttttaggagataatttttttagtttttagaagttggaagataaattttggataatgtattatattatgttttttgtaattaaataatttaagataatgtgttaaagtttagcggagatttaaatttttgagttgattaaagagagttgttaaggttataggttttttaaaaatgagttaatattatttttagaaattgtaggtattatatagtgatgaattgtttatttttattgtttattattttttagttttgtagaatggtttagggttagtagtaattaaaagataatatattataatttaatttgaaggtcgggacgaaggtaggaattggattttaggttggttttgggttgtgttttttttatttatgggatgtggagttattgaaggttgtggggttacgatgtaggtgttgttttagaaagatatattcgattgtgtgtgtaaatgggttggggcggagaggagagagagaggtagagtttatttggagattattgtaatagttaggttgacgagttaagagcggggtatagtaagaatgggaagaaatttaagaagaaaatggtagtgcgcggggttaataatggacgatgatcgaatttaggtggggatgggtgagtgacgagaagaatcgtttcgtgtcgtttagggagttttttgattttttttttgtttttagagcggacgtttttttattagtttttaattagcgttattagcgtaagttttaagttggttaggttagtaatagtcgtaacggaggtaggagtcgatacgttcgtatttcggtttttttttcgttttcgtattttcggtagttttttcggtttgattatttttttcggttttttgtttttttcgatttttagttttcgtcggtcgtcggtattatttttcgttttttttcgttttttttttcgtggggcgttgattcgttcggttgttacgttttattgatgatattattagggtagttcggttttagttaattcgttagggggagttcgagcgaagttttagttagcgagttagaggggaggggagtagggaggggtcgagggtggggaggtgagggagtggggaatggggcgggcgataattttttaggtacgtatgttttagaggcgcggcgtttggcgggaagttgagttttggttttgcgtcgtattgtttgtttttagttcgcgtagcgcgttcgcgattttttttttcggtatgttaggcggtgcggtcgttttttggggcgtgtaaaggtttttcggtttaaggtttttttattttttggttcgtcggcggttattttgggtggaagcgatagttgagtggcggcggttgttgattgtgttttaggggacggagtaggggaagacgtttgttttttcggaatagtttattttatttttttttttcgattattcgtggcgcggagagttagggcggcggttgcggtagtaagggcggcggtggcggcggcggtagttgtagtgatatgtttagtatgaatttcgaatagtgagtttaggagagtatcggtcggttgggttcgtgggttagtttgggggattttaaaggggtcgaggagggttggggtagaagtcggggtatcggttggggtgaggcgagggtgatgggttaggagaggttggcggtcgggagtcgggttttattgtttgacgcggaggggcggtcgcgcgggggaggggtcgggtcggaggggtgagtcgttcgggtttggatcgggttaggttagagggtttgattgcggggcgggtgttgaggaagtttgtcgaggggtttggggcggtgtgaaggggtattttttttcggaggtagtgatttttgaaggaggatttgtttttaaggggaggggatggggtgggagagtttttttagagggtattgttagattttgcgtacgtattttgcggagttgttaggattttcggggtagaaattagttttatttgtaaattttgagtttgttggttttttttttttttatttttttcgttaggttttaggtaatatggatgtttttcgggattgcgtgggattgaggggaatgagtagatggtgagaagtaattgaatatttattagttttttttttgagttgtgttttggaggagttgtttaagagttcgtcgggtttattgtttttttataaaaatttgggtatttgtgagaattttgttttttttttttttaaagaggatatttaagttattttgttttttgtgggttaagggaaaaaaaaaaaattaaagttaagaaatgtttttttgatattcgtagattaaaggaagtttgttgttaagttgaaagagaaacgaacgggatttatgatagatttgtatgtaggttttggattatttgtttggatgtttgtagatagggaatgaggttttatgacgtgttatgaaaagttaatgtattttttttttttgtttatttaagaagttattatagtagatgtgatatatttggtattttttttgggaattggtgtttattttttttgggtagagtttgttgggttttttttaatggttttttaaaaattttttttatagtttatatgtatgtaaagtaatgaataattggaagagatcgaattggtatttttttttagtgttaaaggtttttgagggatgggggaatattagtatttgttgtaaaagttgagtttatttgttggtttggttaattattgttagatatttttttttaaaaggtttatttattagtttagttgattgttatatgtgtgttatatggtttttgtaaaatgtttataagttttgtaatagtgtggtttgaagttgaaattttttgtattaaatagaaatcgtagtattttattagaattttatgttttagaagttgagggtagtgtttttgtagtgatatttgttgtgttgatagtttaaaaaaaatttttttttaagggttttaaggataaagttggttttgtatagttgaacggaggtgaatttgaggtttttaatttagtagtttttttggtaataataaagaatatggatttattgttttatcgaggtttatagatttttattgtttaggaaattttttgaatttgttatatatatgtttattagtgtaaataaatttttaagattagttgagaattttgataagttatttagtttttgaatttttttttttttttgtaaaataggataattggagttattatttttgttagggtagtggtgaaatttaaatgtatataaaagaatttgaaaaatcgtgtgagtattttttaggtggtatgtattatttttatgaaaggtattttattagtattaggatttaggaatataatttttgcgtttaagaagtttagatataggttaggcgcggtggtttattttagtaattttagtattttgggaggtcgaggcgggcggatttcgaggttaggagatcgagattattttcggtaatacggtgaaatttcgtttttattaaaaatgtaaaaaaattagtcgggcgtggtggtgggtatttgtagttttagttattcgagaggttgaggtaggagaatggcgtgatttcgggaggtggagtttgtagtgaattaagatttggttattgtattttagtttggacgatagagtaagatttcgttttaaaaaaaaaattatttattgttttgagacggagttttaattttgttgtttaggttggagtgtaatggcgtaaatttttttttatcgttattttcgttttttgggtttaagtgatttttttgttttagattttcgagaagttgggattataggtatgtgttattattttcggttaattttgtatttttggtagagacggggtttttttatgttggttaggttggttttaaattttcgaagtgattcgttcgttttagttttttaaagtgttgggattataggcgtgagttatcgcgttcggtagaaatagattttatatatgttaaatattagtagatatagtaaattttagatgtgtggtatggatgagagtaataagattttagggggatggtgggttgtggttggttatttgggttttggaagattttatagaagagagatttgaaagggatttattagtaattagatttggaggaatagagggagtgattaggaatttttaagggggagaagaaggaggaatggtttataaatgataaggatagtaattaataagtaaatacggtgttaaattatttttttttttgaagattaatgattttaaagggattaaatttagaaatagtttttatattttttttgggattaaatatatgggtatttggtttattatatttgtattttagattgtttagtaaaataatataggaatttgagaaaatttttgtaaaagtgttagtgaaaattatttagggtgagaggaagtgagggatattttattaggggaggttataagggtagtgagtaattagatttttagtaatttgatttaagtagtttttttttgttttaatgaagtttgttatttttataaaagtaattagagaaaatttggaaaataaaggaaagaaagaaaagttttttagtgttttattacgtaaatataagtttattcgtttttaatattttgttttaaattttaaagttttgttttttttttaattaaaattttaatgggtggatgttttttttgtttttagtatgttattttaataattaataatggtatattagttaatgtttataaatgtattttagatgttttttaagttattttggtttattattattaatttatattgttttttttagaaatttataatttttgttaatgggttttgttaaatttggtagtgaaaatgggattttgagaaaaaagattttgaagtaatagaatttttagatttatattggtttatataagagttggtagttgtattattttttttgtttgttttgttttttttttgagacggaattttgttttgtcgttcgggttttggttttttaaagtgttgggattataggcgtgagttattgtgtttggttgtttgtgtttttttttgtttttgtttttttttttttttttttttttcgagatggagttttattttgttatttaggttggagtgtagtggcgcgattttggtttattgtaatttttgttttttgggtttaagcgatttttttgttttggttttttgagtagttgggattataggtatttgttattataattagttaatttttgtatagagtatttagttatttttaatgttgattaggttgaagtaggtggattatttaaggttaggagtttaagattagtttggttaatatggtaaaattttatttttattaatatagaaaattatttgggtgtgttggttggcgtttgtaattttagttattcgggaggttgaggtaggataattttttgaatttcggaggtggaggttgtagtgagtcgagattatattattgtattttagtttgggtaatagagtaagatttgttttaaaaaaaaaaaaaaaaaaaaaaaaaaggtaattgaaagtgtaatttgaatagttaaaaaagtagatagaaagggttaaagtttttttttgaggatttgaagaaaaatgtggattttttttgagttacgttttgaagtaggtagtgattattttagtatattaagaaatgtttaatatggttaggcgtagtggtttacgtttgtaattttagtattttgggaggtcgaggtgggcggattatttgaggttatgattagtttggttaatatgatgagatattgtttttattaaaaatataaaaattagttgggtgtggtggtgtacgtttgtaattttagttatttaggaatttgaggtaggagagttatttgaatttgggaggcggaggttgtagtgagtttagattatgttattgtattttagtttgagggatagagtgagattttttaaaaaaaaaaaaaaaaaaagaaagaaatatttaatattattttcgtgattatttttataatattttttataatttattggtttttagtggatttttttagtgttaagaaaataattttgattggtttatttttaaggaatgtgttaagaataaagtatgtttatttgtttttagtatattagttaattatagtaggaagaaatatagtagtttatttagattaattataattttttaatgtagaaaaagtttaaagtatttattttatttttagtttttatttttttaagtatattatggttttagaatttttgaaaatgttattagttttttagattttgttttttttttatgttatatttaagaaatatttgatttttttttttttttttgtttgtattgtgttttaaataatttttaataaaatttaagtgtttgaaagtgaaagtaggttgtttttgtgatttttggtggtggtttgaaaaatttagaaaagtttaaagaagaaagataattagtatttttattgtttagaatatgattttttaaatgtttatagaatattattatttgtaattttttcggtaatttaagtatttagtagttgtataaaatttttaaaatatatatattgagaattttgtgtgaatgagatgatgagataattttgtaggattatttaaagataagaattgaggtttggtatagtggtttatgtttataattatagtattttgggaggtttaggcggtagattatttgaggttaggagtttgagattagtttggttaatatggtaaaattttgtttttattaagtatagaaaaattaattgggtgtggtcgtgtttgcgtgtagttttagttgtttgggaagttgaggcgggagaattttttgaattttggaggtgggtattgtagtgagttgagattgcgttattgtattttagtttgggcgatagagtaagattttgttttaaaataaagtaaaataaaatgaagataataattgaaattttatattaaaaatttttttgtagcgattgtgttttttatgttgtgtaggttggttttaaatttttggttttaagcgatttttttaaagtattgggtgggttattatgtttagtttgaaattttgtattaaaaaatttttcgtttttggttgggcgaggtgttttacgtttgtaatagtagtttgggaggtcgaggtaggtagattatttgaggttagttttagatcggtttggttaatgtggtgaaattttgtttttattaaaaatattaaattagttaggcgtggtggtgtgcgtttgtagttttaagttattgaggaggttgagataagagaatcgtttgaatttgggaaaaagaggttgtcgtgagttaagattggttattgtattttagtttgggtgatagagtgagattttgttttaaaaaaataaaaaataaaaatttttttttttaattaaattaagttaaaatgagggatgttagatagtttttaattattaaatattttagtttagtttttttttttaacgttgttttaaagatggaagtgttttaaaattaaattttttttgttagttttttatttggtttttttttttttttttttgagatagagttttattttgttattggagtgcgttggcgtgatttcggtttattgtaattttcgttttttaggtttaagtgatttttttattttagttttttaagtagttgggagtataggtgtgtgttattatattcggttaatttttgtagttttagtagagatagggttttattatgttggttaggttggtttaaatttttgatttcgtgatttatttattttagttaaattgttgggattatttgtgtgagttacgcgtttggtttttatttggtttttaaagggaattttgttttttgagtaattttattttttaggtattttggtttttttaattttggaagtaattttaataatttatgtatgtgttttgtaattttagtattttgggaggtcgaggtgggcgaattacgaggttaggagatcgagattattttggttaatacggtgaaattttatttattaaaaatataaaaaattagttgggcgtggtggtaggcgtttgtagttttagttatttgggaggttgaggtaggagaattatttgaattcgggaggtagagtttgtagtgagtcgagatcgcgttattgtattttagtttggcgatagagcgagattttgttttaaaaaaaaaaaaaaaaaaatttagtttaggttaaagtgtattggtgcgatattagtttattgtaatttttattttttaggtttaagcgatttttttgttttagttttttgagtagttgagattataggtgcgtgttattacgttcggttaattttgtatttttagtagaggtagggttttattatgttggttaggttggttttaaatttttgattttaggtgatttatttgtttgggttttttaaagtgttgggattataggtttgagtttcgtttggtttttttataattttttaatttttataaaaattttttttaaaattttttttattttgaattaaatttagatttattgaaattgtgaaattaatgtggagtttttgtatattttttttttcgttttttttaatagtaatattttatatatatggtatatttgtttaaattaagaaataaatattggtatagtgttaattatagatttaatttggtttttttaatttttttattaatgttttttttttgttttaggatttaatttagtatattatattgtatttagttgtaggttatgttagttatttttaatttgtgatagttttttagtttttttttttttttcgttattttgataagtttgaagagtgttgataggtattttatagaatgttcgttagttgtttgttagtttgtatttgtttgatgtattttttttttttttttgagatggtgtttcgttttgtcgtttaggttggagtgtaatggtatgattttggtttaatgtagtttttattttcggggtttaagtgattgttttgttttagttttttaagtaattgaaattataggtatgtgttattacgtttggttaattttttgtattttagtagagaagtagttttatcgtgttgtttaggttggtttcgtgtttttgagtttaggtaatttattcgcgttggttttttaaagcgttaggattataggtgtgagttattatgtttggttaatattttgagggatatattttggtgaggttatgtagatattttgtttttttttagttttatttattaatttagtatttatttagtaaattttttttgtagtaattatttttttttttttttttttttttaattttttttttaagagatgggattttattttgttgtttaagttggaatgtagtagtgagtttatagtttattgtagttttaaatttttgggtttaagtgatttttttgttttagttttttaagtagttgggattataggtatagattattatatttagttaattaaaaaaaatatttttagagatgggggttttgttatgttgtttaggttggttttgaatttttggttttatgtgatttttttattttagttttataagtaggtgggaattataggtgtgagttattatatttagtattgtagtaattattaatgtagtgttattggttattttttgttttttttatttttttagtatgtgttattgatttgtttttttttttttatttataattatttatattgttatgaatttatgagtatttattttgtgagttataatttaatacgtatttaatttattttgtgttttaaattgttttggtttggttatttttttttttttttttgagacggtttcgttttgttgtttaggttggagtgtagtagcgttatttttttttattgtaatttttatttttcgggtttaagcgatttttttgttttagttttttgagtagttgggattataggcgtgtgtcgttatattcgtttaattttttgtatttttagtagagatagggttttattatgttagttaggatggtttcgattttttgatttcgtgatttgttcgttttagtttttaaaagtgttgggattataggcgtgagttattaagttcgatcggtttttgtatttttttaatatgaggtgttgttattattttttttttttaatattttggttaaaaatgttaattaaggatggtataaattttttgtagttgtattttataacgaaagaggtttgattaaaaatgtaaaattaaaatgttttttgattttttagtatatgttttgtaaaaggtatagtgttagatttttgtatacgtagatgagtaagttagtttattttttatatttatagatagttatgttaaacgtaagggtggagaaatatagattttaaatttttcgagggtagaaaatatgaggttatagtagattagaattataaaaagttagaggaagttttgaattggaaatagtggataggatttattagaataatttacgagggtgataattgtaaatttttataggtttttttttttttttttttttttttttttttttgagatggagtttcgttttgttgtttaggttggagtgtaatggcgtagtttttttttattgtaattttcgttttttgggtttaagtgatttttttgttttagttatttaagtagttgggattataggtatttgttattatgttgagttaatttttgtatttttttttttagtagagacggggttttattatgttggttaggttggttttgaatttttgattttaggtaatttatttattttggttttttaaagtgttgggattataggtgtgagttatcgcgtttagttaaatttttattggtttttaaattagtataatttagttttttttatttaagttaaaattatattattgtaggataaaaatttagtgatttaaatttatgaggaatgaagaataaatatatttaaagttttattatttgttaaattagttttggttttttgtattaaaattttgtttttgtgttttgtaattttatatttgtatattttttattaatatttttattgtgtggtgttttgtaaattataaaaacgttttaaagtaaatttagaataatgaatttttacgaatatttagtatatttatagttgagaaataaattatttttgtagtaggtaatttaaaatgttttaatgtaagttaacgtgttattgattacgttatttaagtgtgtgtttttgataaggggaggtggggaagtttgtgggtttgattttatttgttttttttatgtgattgttgttatgttagtaaataaatggtttgcgagagaattagtagttttttgtaaagattgttttatatagagtatttaattttttatattatttataatggttttaatttaagttttaaattattagaaatttataaataatttttttatttgtttttttgagatggagtttcgtttttattgtttaggttgaagtataatgatgtgattttgatttattgtaattttcgtttttcgggtttaagtgatttttttgtttttgttttttaagtagttgggattataggtatgcgttattatgtttggttaattttgtatttttagtaaagacgggattgtattatgttggttaggttggtttcgaatttttaattttaggtgatttatttgtttcggttttttagagtgttgggattataggtttattgagttattgtgtttagttataatgcgttaaaataagagtgttatatttgtaaaatttaaaaaaatgtagtggttgaaaaaggtaatttaaaaagaattgattattaattttttgaaattataatgtaatttgtagtgtaattaggaaatttttatgtttttttttttttttttttttttttttgagatggagttttgtttttgttgtttaggttggagtgtgtgatgttagcgtattgtaatttttgttttttgggtttaagtaatttttttgttttagtttttcgagtagttgggattataggcgtttgttattatatttagttaatttttgtatttttagtagaggcggggttttatcgtgttggtttggttggtttcgaatttttgaatttaggtgatttattgtatttggttttcgtttatgttttttaaagttttatggttgttttgaaatagagttgttgattttttttttttttttgagattttttttttgttcgtgttggagtgtagtggtgtgatttgagtttattgtaatttttattttttgagtttaagtaatttttatgggttagttttttaagtagttgagattaaagttgtttattattatgtttagttaattttagtatttttagtagagatggggttttatcgtattggttagggtggtttggaatttttgattttaggtatgagttattacgtttagtttgggttgttgatttttaaggtgatattttaggtaatatttgaggtttagtatagttttttattttaattggttttagtatagtaaatttagggaatgtttttgagtgtttattggatgtttggcgtggagtttagggagattggtatattgagtttagttgttgtgttgaaatttttgtttaaaaatttttttattaagttttagttatttaggaggttgaggtttgagaattatttgaatatttggaggtagaggttgtagtgaatcgagatcgagttattgtattttagtttgggcgatagagtgagattgtttaataataaaaataatattttttaaaaaattaatttattatggtagtattaatgttgtgatagtttttttttttttatataggtaaatttttaatatatatttattgttaatgtttagtgtttagtatttttaagagtatttggggttaggtacggtggtttatgtttgtatttttagtattttgggaggttgaggtgagtagattatttgaggttaggagtttgagaatagtttttaatatgatgaaattttcgtttttattagaaatataaaaattagttgggtgtgttagtatatgtttgtaattttagttattttagaggttgaggtaggagaattgtttgaatttgggaggtggaggttgtagtgatttgagattgttttattgtattttagtttgggtaatagagcgagatttttgttttaaaataaataaataaaaaaagaatatttggggttaggtatggtggtttatatttgtagttttagtattttgggaggttaaggcgggtggattatttgagattaggagttggagattagttcgattaatatggttaaatttcgtttttattaaaagtataaaaattagtttgagtaatagagtaagattttgttttaaaaaaagaaagaagaatatttggtttaattaagaaggaattttattaatagtagtaaagttagttagttgaattgttaagtataaattgttggtattaggtattaattatttattaaggataatattttataatagcgatttttttaaaaattttaaaattttaaattggaaaggatgtttagtttattttatgttttagtttttttttttgatttatttgtttagaagatttttgtttttttttttgatttttattttgttgttgattggtatttgggatttttaaaaaattattttttttatatataattaaagataataagtataataataagtataatatggtaatttgttaaaatttaaataatgttttaagtaatgtatattattatgtaaatttacgtaatagttgaatatttataaagataatcgtttatagaagttttatatttttttttttttggtagtgtaattaaaataaaaaaaataagttttatgttttgtttatatgtaaataattttaatttaaattgtgacgtggtttttattttagtatatttttgaaagtaaattaaaaaggataaaatataaaattatgtatattttttataaaaacgatatataaattttaaggtttttgtttttttgaaattgtttaaaagaatgtatagaattggtgtttgagttgggaaggatttatgagggatttttttggagattgtgggtgaataataatgttgttttagttttatgaaggaatttttggggatagtttttgagttaggtttggtaatgttagagatatataaagagagttttgttttattattgggtgcggtggtttatatttgtaattttagtattttgggaggttgaggcgggtagattatgaggttaggagatcgagattattttggttaatacggtgaaattcgtgtttattaaaaatataaaaattagttgggcgtggtggcgtatgtttataattttagttattcgggaggttgaggtaggagaattatttgaattagggagttggaggttgtagtgagtcgagatcgcgttattgtattttagtttgggtgatagagtaagatttcgttttaaaaaaaaaaagtttggtttttaatggttttgaaaaatgttttaatataagtgtagagtgttagttaagttttgtatttggataaatagtttgtgaatttattatatttttagtttataatatgggtttttagaagttatatgaatattgttttgacgggagaatttaagttggatgttagagaaggatcgtgagaatttttttattggaggagtgttatgaaattatttgattttggaatttttttttttttttttttttttttttttgagatagagtttcgtttttattgtttaggttggagttggaatgtagtggtacgatttcggtttattgtaatttttgttttttgggtttaagtaatttttttgttttagtttattaggtagttgggattataggtatgcgtaattatgtttagttaatttttgtatttttaatggagacggggttttattatgttggttaggttggttttgaatttttgattttaagtgaattgtttgttttagttttttaaagtgttgggattataggtgtgagttattgcgtttggtttgattttagaatttgaaggagagattaatattttatgggtaaaaataatgaaaagttatttttttgtattttaatattatagaggagtgggatttatttagaatgttttaagtattttgggtagtttaagagtgcgtattatttattttttttttttttttttttttttaagtggaagtttattgatgttagagattataggtggtattgtttattttttatataattttattatgtttagtgatttgttagaagggttgtggttgtttgtagttttggtttaagttatgtatgggttttataggagatgtagtttttatagtgagttgttatttgtagttgtgtttttgtttttgtatagtttatagtaatgtagtgtgttttttattaatattattttttttttttttttgtagtgattatttatttaagttatttttgattggcgatttaggggttggaaagttttgttttttttttaggtttgta

SEQ ID NO: 442 - DNA, 19131 bp, Artificial Sequence
  chemically treated genomic DNA (Homo sapiens)
tgtaaatttaagaagaaggtaagattttttaatttttgagtcgttaattagaagtaatttgaataaataattattgtaaaaagaaaaagaaaatgatgttaataaaaagtatattgtattgttataagttatataaaaataaaaatatagttataaataataatttattgtgaagattatattttttataaagtttatgtatggtttaagttaaaattgtaaatagttatagtttttttgatagattattaaatatgataaaattatgtaaaaagtaggtaatgttatttatgatttttaatattagtgaatttttatttaaaaagaaagaaggaaaagaaaaataagtgatacgtatttttggattgtttaagatatttaaaatattttaaataaattttatttttttatagtattagaatatagaaaggtaattttttattgtttttgtttatgaaatattagttttttttttaaattttaagattaggttaggcgtagtggtttatatttgtaattttaatattttgggaggttgaggtaggtagtttatttgaggttaggagtttaagattagtttgattaatatggtgaaatttcgtttttattaaaaatataaaaattagttgggtatggttgcgtatgtttgtaattttagttatttggtaggttgaggtagaagaattgtttgaatttaggaggtagaggttgtagtgagtcgagatcgtgttattgtattttagttttagtttgggtaataagaacgaaattttgttttaaaaaaaaaaaaaaaaaaaaaaaaaaaaattttaagattaaataattttatagtatttttttaatgaaggggtttttacgatttttttttagtatttagtttgaattttttcgttaaaataatgtttatataatttttgaaagtttatattataaattagaaatgtgataaatttataggttgtttatttaagtgtaaaatttgattaatattttatatttgtattaaagtattttttagaattattgaaaattaagttttttttttttgagacggagttttgttttgttatttaggttggagtgtagtggcgcgatttcggtttattgtaatttttaattttttggtttaagtgatttttttgttttagtttttcgagtagttgggattataggtatgcgttattacgtttagttaatttttgtatttttagtagatacgggttttatcgtgttggttaggatggtttcgattttttgattttatgatttgttcgttttagttttttaaagtgttggaattataggtgtgagttatcgtatttagtgataaaataaggttttttttatgtatttttaatattgttaggtttaatttaaaaattatttttagagatttttttatggaattaagataatattattatttatttatagtttttaaggaaattttttatagattttttttaatttagatattagttttatgtatttttttaagtaattttaaaaggataaaaattttagaatttatatatcgtttttgtagaagatatatatgattttgtattttgttttttttgatttatttttaaaaatatgttaaagtgaaaattacgttataatttagattaaaattatttatatgtaaataagatataaaatttattttttttgttttaattgtattgttaaagaagagaggatataaaatttttataagcgattatttttgtgaatatttaattattacgtaggtttatataatgatatgtattatttaaaatattgtttgggttttagtaaattattatattatatttattgttatatttattgtttttaattatatatgaggaaaataattttttaaaaattttaagtgttagttagtagtaaaatagaagttagagaaggaaataaaaattttttaaataagtaaattagaagaggggattgaagtatagaatgaattagatattttttttagtttgagattttaaaatttttaaaaagatcgttattgtagaatattatttttaataaatgattgatatttaatattaataatttgtatttggtagtttagttggttgattttattattattgataaggtttttttttaattaaattaaatatttttttttttttttttgagatagagttttgttttgttgtttaagttaatttttgtatttttagtagagacgggatttagttatgttggtcgggttggtttttaatttttgattttaagtgatttattcgttttggttttttaaagtgttgggattataggtgtgagttattatgtttggttttaaatattttttttttgtttgtttgttttgagataagagtttcgttttgttgtttaggttggagtgtagtgaagtaattttaggttattgtagtttttattttttaggtttaagtaatttttttgttttagtttttgaagtagttgggattatagatatgtgttaatatatttagttaatttttgtatttttagtaaagacgggagttttattatgttggaggttgtttttaagtttttaattttaggtaatttgtttattttagttttttaaagtgttgggagtataggtatgagttatcgtgtttggttttaaatatttttaagaatattgaatattgaatattaataatgagtatatgttaagaatttatttgtatgaagaaaggaagattattatagtattgatattattatagtaggttggttttttggggggtgttgtttttgttgttagatagttttattttgtcgtttaggttggagtgtagtggttcgatttcgatttattgtaatttttgtttttaggtgtttaagtgatttttaggttttagttttttgagtagttgggatttagtagggaggtttttaaatagaagttttaatataataattggatttaatgtattaatttttttgaattttacgttaggtatttagtaaatatttaaaaatattttttgaatttgttgtattggagttagttgaagtaaaggattgtattgggttttagatgttgtttgaagtattattttaaagattaataatttaggttaggcgtagtggtttatgtttgaggttagaagttttagattattttggttaatacggtgaaattttatttttattaaaaatattaaaattagttaggtatggtggtgggtagttttaattttagttatttgagaggttgatttatgagaattgtttgaatttaggaggtggaggttgtagtgagtttagattatattattgtattttagtacgggtaaaagaggagttttaaaaaaaaaaaaaaaattaataattttattttagagtaattataaagttttaaaaaatatgaacgggggttaggtgtagtggattatttgagtttaggagttcgagattagttaggttaatacgatgaaatttcgtttttattaaaaatataaaaattagttgggtgtggtggtaggcgtttgtaattttagttattcgggaggttgaggtaggagaattgtttgaatttaggaggtagaggttgtagtgcgttgatattatatattttagtttaggtaataagagtaaaattttattttaaaaaaaaaaaaaaagaaagaaagaaatatgaaggttttttaattgtattataagttatattatggttttaagaaattaatagttaattttttttaaattattttttttaattattatatttttttaagttttataaatataatatttttattttaacgtattatggttgggtatagtggtttagtgagtttgtaattttagtattttgggaggtcgaagtaggtggattatttgaggttgggagttcgagattagtttggttaatatggtgtaatttcgtttttattaaaaatataaaattagttaggtatggtagcgtatgtttgtaattttagttatttgggaggtaaaggtaggagaattatttgaattcgagaggcggaggttgtagtgagttaagattatattattgtattttagtttggataataagggcgaaattttattttaaaaaaataaataaaaaaattatttatgagtttttaataatttaaggtttaaattaaagttattataaataatatgaagaattgagtgttttgtataagataatttttgtaaaagattattggttttttcgtaaattatttgtttattaatatgataatagttatatgagaaaggtaaataaaattaaatttataaatttttttatttttttttattaaagatatatatttgaatagcgtgattagtgatacgttaatttgtattgggatattttaaattatttattatagaagtagtttattttttaattgtaaatatattgaatattcgtgagaatttattgttttgagtttgttttaaaacgtttttataatttataaaatattatatagtaaaaatgttgatagaaaatatataaatataaaattatagagtataaggatagaattttggtataaagagttaagattaatttagtaaatggtaagattttaaatgtatttattttttattttttatgaatttggattattaagtttttattttataataatataattttgatttaagtgaaaaaaattaaattatgttagtttagaaattaataaaaatttggttgggcgcggtggtttatatttgtaattttagtattttgggaggttaaggtgggtggattatttgaggttaggagtttaagattagtttgattaatatggtgaaatttcgtttttattaaaaaaaaaaatataaaaattagtttagtatggtggtagatgtttgtaattttagttatttgggtggttaaggtaggagaattatttggatttaggaggcggaggttgtagtgaggagagattgcgttattgtattttagtttgggtaatagagcgagattttattttaaaaaaaaaaaaagagaaaggaaaaaaaagaaatttatgaagatttataattgttattttcgtaaattattttagtaaattttatttattgtttttagtttagaattttttttagttttttgtagttttaatttattataattttatattttttattttcgagaagtttggggtttgtgtttttttatttttacgtttgatatagttatttgtgggtgtggaaggtaagttgatttatttatttacgtatataaggatttagtattgtgttttttataaagtatgtgttaagagattagagaatattttagttttatatttttaattaggtttttttcgttgtgagatatagttatagaaaatttgtgttatttttgattaatatttttggttaaaatattagggggaaaaaatgatgatagtattttatgttaaaaggatataggagtcggtcgggtttggtggtttacgtttgtaattttagtatttttggaggttgaggcgggtagattacgaggttaggagatcgagattattttggttaatatggtgaaattttgtttttattaaaaatataaaaaattagacgggtgtggcggtatacgtttgtagttttagttatttaggaggttgaggtaggagaatcgtttgaattcgggaggtggaggttgtagtgagaagagatggcgttattgtattttagtttgggtagtagagcgagatcgttttaaaaaaaaaaaaaaaaatggttaagttagaataatttgaggtataaaataaattaagtacgtattagattataatttataaaataaatatttatgaatttatagtagtataaatgattataaatgggagggaagagataagttaataatatatgttgaagaaatgagaaaaatagaaaatgattagtagtattatattaataattgttgtaatgttgggtgtggtggtttatatttgtaatttttatttatttgtaaggttgaggtagaaggattatatgaggttagaagtttaagattagtttgagtaatatagtaaaatttttatttttaaaaatattttttttaattagttgggtgtggtggtttatgtttgtagttttagttatttgagaggttgaggtagaaggattatttgagtttaggagtttgaggttgtagtgagttatgaatttattattgtattttaatttgggtaatagagtgagattttattttttaaaaaaaaaattaaggaaaaaagaaaaagaaaaaataattgttgtaaggaagatttattggataaatgttaaattaatggataaaattaaggagaaataggatatttgtatgattttattaaagtatattttttaaaatattggttaggtatggtggtttatatttgtaattttagcgttttgggaggttaacgcgggtggattgtttgagtttaggagtacgagattagtttgggtaatacggtgaaattgtttttttattaaaatataaaaaattagttaggcgtggtggtatatgtttgtagttttagttatttgggagattgaggtaggatagttatttgaatttcggaggtggaggttgtattgagttaagattatgttattgtattttagtttaggcgatagaacgagatattattttaaaaaaaaaaaaaaaatatattagataaatataaattgatagataattgacggatattttataaaatatttattagtattttttaaatttgttaagataacgaaaaagaaggaaagattgagaaattgttatagattgaaggtggttaatatggtttataattaaatataatatggtatattgaattagattttagaatagaaaaagaatattagtgaaaaaattagagaaattagattaagtttatagttaatattgtattaatgtttattttttaatttggataaatgtattatgtatgtaagatgttattattaggaaaagcggaaagaagggtatataagaattttatattgattttataattttagtaaatttaaatttagtttaaaataaaaagggttttagaaaaggtttttataaaggttaaaaaattatgaggaggttaggcgaggtttaagtttataattttagtattttgggaggtttaggtaggtggattatttgaggttaggagtttgagattagtttggttaatatggtgaaattttgtttttattaaaaatataaaattagtcgggcgtggtggtacgtatttgtagttttagttatttaggaagttgaggtaggagaatcgtttgaatttgggaggtagaggttgtagtaagttgatatcgtattagtgtattttagtttgggttaaatttttttttttttttttttgagatagagtttcgttttgtcgttaggttggagtgtagtggcgcgatttcggtttattgtaagttttgtttttcgggtttaaatgatttttttgttttagttttttaagtagttgggattataggcgtttgttattacgtttagttaattttttgtatttttagtagatggggttttatcgtgttagttaggatggtttcgattttttgatttcgtgattcgtttatttcggttttttaaagtgttgggattatagggtatatatataaattattaagattgtttttagaattaaaaagattaagatatttgagaaataaaattatttagaaagtaaaattttttttaaaagttaagtagaagttaggcgcgtggtttatataagtaattttagtaatttggttgaggtgggtggattacgaggttaggagtttgagttagtttggttaatatagtgaaattttgtttttattaaaattataaaaattagtcgggtgtggtggtatatatttgtatttttagttatttgagaggttgaggtggaagaattatttaaatttggaaggcggaggttgtagtgagtcgagattacgttaacgtattttagtgataaagtgagattttgttttaaaaagaaaaaaaaagaagttaagtagagaattggtaaggaagatttgattttgaagtatttttatttttaagataacgttaaaaaaaaaaattaaattaaaatatttgatggttaaaaattgtttaatattttttattttaatttaatttgattaaagggggaaatttttattttttatttttttgagatagaattttattttgttatttaggttggagtgtagtggttaattttggtttacggtaattttttttttttagatttaagcgatttttttgttttagtttttttagtagtttgggattataagcgtatattattacgtttagttaatttggtgtttttagtagaggtagggttttattatattggttaggtcggtttagaattgattttaagtgatttgtttgtttcggttttttaaattgttattataggcgtgagatatttcgtttagttaaaagcgggaaattttttaatgtaaaattttaggttggatatggtggtttatttagtgttttggaaggatcgtttgaggttaggagtttgagattagtttgtataatataggaggtatagtcgttataaaaaaatttttaatgtgaaattttagttgttatttttattttattttattttattttgagatagagttttgttttgtcgtttaggttggagtgtagtggcgtaattttagtttattgtaatgtttatttttagggtttaagagattttttcgttttagttttttaagtagttgggattatacgtaggtacgattatatttaattaatttttttatgtttagtagagatagggttttgttatgttggttaggttggttttaaatttttgattttaggtgatttatcgtttgggttttttaaagtgttgtgattataggtatgagttattgtgttaggttttagtttttatttttaaatgattttataagattattttattattttatttatataaaatttttaatatatatattttaaaggttttatataattattgaatatttaaattatcggaagaattatagatggtgatattttatagatatttaaaaaattatattttggataatgagaatattagttattttttttttttaaatttttttgagttttttaaattattattaaaagttataaagataatttgtttttatttttaaatatttaagttttgttaaaaattatttgaaatataatgtaagtaaaaaaaaaaaaaaaggttaaatgttttttgagtataatatgaaagaagagtaaagtttgaaagattgataatatttttagagattttggagttatgatatatttaaggggatgggggttaaaaataaggtaaatattttaaattttttttgtattaaagaattatagttgatttaagtagattattatatttttttttattatagttagttggtatattgaagataggtagatatgttttatttttaatatattttttaaagatgaattaattaaaattatttttttgatattaaaaaaatttattggaagttagtggattatgaaaaatgttatgagaataattacgagaataatgttaagtatttttttttttttttttttttttttttgaggagttttattttgttttttaggttggagtgtagtggtatgatttggatttattgtagttttcgttttttaggtttaagtgatttttttgttttaggtttttgagtagttggaattataggcgtgtattattatatttagttaatttttgtatttttagtagaggtagtgttttattatgttggttaggttggttatgattttaaatgattcgtttatttcggttttttaaagtgttgagattataggcgtgagttattgcgtttggttatgttaagtattttttaatgtgttgaaataattattgtttgttttaaaacgtagtttaaaaaaaatttatatttttttttagatttttaaaaaaaagttttaattttttttatttatttttttaattgtttagattatatttttaattgttttttttttttttttttttttttttttgagataagttttgttttgttgtttaggttggagtgtaatggtgtgatttcggtttattgtaatttttattttcgaggtttaagagattgttttgttttagtttttcgagtagttgggattataggcgttagttaatatatttagataattttttgtattagtagagatagggttttgttatattggttaggttggttttgaatttttgattttaggtgatttatttgttttagtttgattaatattagagatggttgggtattttatataaaaattagttggttatggtggtaaatgtttgtaattttagttatttaggagattaaggtaggaaaatcgtttgaatttaggaggtagagattgtagtgagttaagatcgcgttattgtattttagtttgggtgatagagtgagattttatttcgaaaaaaagaaaaagaaaagaaaataaaaataaaaaaaaatataaatagttaggtatagtggtttacgtttgtaattttaatattttgggaggttaaggttcgggcgatagagtaagatttcgttttaaaaaaaaaataaaataaataaaaaaagtaatatagttattaatttttatgtaaattaatataaatttaaaaattttgttgttttagaatttttttttttaagattttatttttattattaaatttagtagaatttattaataaagattataaatttttaaaagaaataatataaattggtaatgataaattaaagtaatttaaggaatatttggagtatatttgtaaatattagttaatatattattgttagttattaagataatatattggaagtaggaaaagtatttatttattaaagttttaattgaagagaaagtaagattttggagtttggaataagatgttaaaaacgaatgagtttgtatttgcgtgataaaatattaaagaattttttttttttttttttattttttaaattttttttaattatttttataaagataataagttttattaaaataaaaagaaattgtttaagttagattattaaaaatttgattgtttattgtttttgtgattttttttaataaaatattttttatttttttttattttaagtaatttttattaatatttttgtaaaggtttttttaaatttttgtattattttattaaatagtttagaatataaatatagtaggttagatatttatgtatttgattttagaaaaaatataaaaattgtttttgggtttgatttttttgaggttattagtttttaaaagaaaggatgatttgatatcgtatttatttattaattattgtttttgttatttatgagttatttttttttttttttttttttgaaaatttttagttattttttttgtttttttaaatttaattgttgataaattttttttaggttttttttttataaagttttttaaaatttagatagttaattataatttattatttttttgaaattttgttgtttttatttatgttatatatttggaatttgttatatttattggtatttgatatgtataaaatttatttttgtcgggcgcggtggtttacgtttgtaattttaatattttgggaagttgaggcgggcggattatttcgggagtttgagattagtttgattaatatggagaaatttcgtttttattaaaaatataaaattagtcgggagtggtggtatatgtttgtaattttaatttttcgggaatttgaggtaggagaattatttgaatttaggaggcggaggtggcggtgagaggagatttgcgttattgtattttagtttgggtaataagattgaaatttcgttttaaaataataaataattttttttttgagacggagttttgttttgtcgtttaggttggagtgtagtggttagattttggtttattgtaagttttatttttcgggattacgttatttttttgttttagtttttcgagtagttgggattataggtgtttattattacgttcggttaatttttttgtatttttagtagagacggggttttatcgtgttatcgaggatggtttcgattttttgatttcgggattcgttcgtttcggttttttaaagtgttgggattattgaggtgagttatcgcgtttggtttatatttaaattttttaagcgtaaggattatatttttaaattttggtattaatagaatgttttttatgaaaatgatgtatattatttgaagaatgtttatacggttttttaaatttttttatatatatttgaattttattattattttgataggaataatgattttaattattttattttataaaagggaaaaaaaatttagaggttgagtaatttgttaaagtttttaattaattttgaagatttatttatattaataaatatatatatagtaaatttagaaaattttttgaatagtagaggtttataaatttcgataaagtagtaaatttatgttttttattgttattaagaaaattattaaattaagaattttaagtttattttcgtttaattgtgtaaaattaattttgtttttggagtttttgaaaaaaaattttttttaaattgttaatatagtaaatgttattataagaatattatttttaatttttaaaatatgaaattttaataaaatattacggtttttgtttagtgtaaaagattttagttttaagttatattattataaaatttgtaagtattttgtaagagttatgtgatatatatatgatagttagttaaattggtgggtggattttttaggggaaaatgtttagtagtaattgattaaattagtaaataaatttaatttttataataaatattgatgtttttttattttttaaaggtttttgatattgaaaaggaatattaattcggttttttttaattatttattattttatatgtatgtaaattgtagaggaaatttttaaagggttattgaggagagtttaataaattttatttaagggaagtgaatattagtttttaggaaaggtgttaggtgtgttatatttgttgtggtgattttttgagtaagtaagaaaaagaaatgtattaattttttatgatacgttatggaattttattttttatttgtaagtatttaagtaggtaatttaaaatttatatatagatttattataggtttcgttcgttttttttttaatttgatagtaagttttttttaatttgcgagtattaaaaagatattttttggttttagtttttttttttttttttgatttatagaagataaaatgatttaggtgttttttttaaaaaaaaaaaaaataaaatttttataaatgtttaggtttttataggagggtaatggattcggcgagtttttaaataatttttttaagatataatttaaaaagagaattaataaatgtttagttgttttttattatttatttattttttttaattttacgtagtttcgaaaagtatttatattatttgaaatttggcggggaggatggaaggagagagagttaataagtttaggatttataagtaaagttggtttttatttcgaagattttgatagtttcgtagagtgcgtgcgtagggtttgatagtgttttttagaagggtttttttattttattttttttttttagagataagtttttttttaaaagttattgttttcgagagaagatatttttttatatcgttttaggtttttcggtaggtttttttagtattcgtttcgtagttaggttttttaatttgattcggtttaggttcgggcggtttattttttcggttcgatttttttttcgcgcggtcgttttttcgcgttagataatggggttcgattttcggtcgttagttttttttgatttattattttcgttttattttagtcgatgtttcgatttttgttttaatttttttcgatttttttaagattttttaagttggtttacggatttagtcgatcggtgtttttttgaatttattattcgggatttatgttggatatgttattgtagttgtcgtcgtcgttatcgtcgtttttgttgtcgtagtcgtcgttttgatttttcgcgttacgggtaatcgaaagaaaggaatgagataggttgtttcgggagagtaaacgtttttttttatttcgttttttagaatataattagtagtcgtcgttatttagttatcgtttttatttaaaatggtcgtcggcgaattaggaaatagggaagttttagatcgaggggtttttatacgttttagagggcggtcgtatcgtttggtatgtcgggaaagggagtcgcgagcgcgttacgcgagttgaggatagatagtgcgacgtaaggttaggatttagtttttcgttaagcgtcgcgtttttggggtatgcgtatttgaagggttgtcgttcgttttattttttatttttttatttttttattttcggtttttttttgttttttttttttttgattcgttggttaggatttcgttcggattttttttggcggattggttaaggtcgagttgttttagtgatgttattagtgagacgtggtagtcgggcgagttagcgttttacgggggagggggcggagaggggcggagggtggtgtcggcggtcgacggaggttgggggtcgggggaggtaagggatcggggggagtggttaaatcggagggattgtcgggggtgcgggggcggggagggggtcggggtacgagcgtgtcggtttttgttttcgttgcggttgttgttgatttgattagtttgaggtttgcgttggtggcgttggttgggggttggtaggaggacgttcgttttaagaatagaagggaagttaaggggttttttggacggtacggagcggtttttttcgttatttatttatttttatttgggttcggttatcgtttattgttggtttcgcgtattattattttttttttagatttttttttatttttattgtgtttcgtttttaattcgttagtttggttattgtagtagtttttaaatggattttatttttttttttttttttcgttttagtttatttgtatatatagtcggatgtatttttttgagatagtatttgtatcgtgattttataatttttaatggttttatattttatggatgggagggatatagtttagagttagtttaaaatttaatttttattttcgtttcggtttttaggttgaattgtaatgtattattttttagttgttattaattttgagttattttgtaagattggaaaataataagtaataaaaataggtaatttattattatatagtgtttataatttttgggagtaatattaatttatttttaaaaaatttatggttttaatagttttttttaattagtttaggaatttaaattttcgttaaattttaatatattattttgagttatttaattataaagggtatagtgtaatatattgtttaaagtttattttttaatttttaagaattaagaaaattgttttttgagatttattgtagaattattttaaatttttataacgttaaaatatagaaagaaggtatttatttttatttatatattaattatattttttagtttttaaattttgttatgggttttagttgatgaatttattaaaagttattcgagtttggtttttgaaatgaatatgttggtttttgaaatgaatacggttattattttaggaatattttgaatggtttagtaataggtattaaaaagtgttcgttattttggattttaaagtttattaaaaaaaaaaaaagtttattttgattttaaataaaaatttagaaaattggttaggttcggtggtttatgtttgtaattttaggaatttgagaggttaaaacggatagattacgaggttaggaatttaagattagtttggttaatatggtgaaatattgtttttattaaaaatataaaaattagttaggtatggtggcgcgtgtttgtaattttagttattcgggaggttgaggtaggaaaattgtttgaattcgggaggcggaggttatagtgggtcgagaggttattgtattttagtttgggcgatagagtaagattttgttttgaggggagaaaaaaaattttagaaaattgtgatttgagttattagtaaaggtatatatatatatatatatatatatatatttttaaaaaatttttagaaaattgtttagaattcgtttttagttaaaaatataatttgtttttttttgggaagtatatttttaaattttttttaattaattatttttttttttaataaagaattattttttgttaggcgtagtggtttacgtttgtaattttaatattttgggaggttaaggcgggtagattatgaggttaggagatcgagattattttggttaatatggtgaaatttcgtttttgttaaaaatataaaaattagttgggcgtggtggcgtgtggtacgtgagattatagaattttagttattcgggaggttgaggtaggagaatggtttgaattagggagttagaggttgtagtgagtcgagatcgcgttattgtattttagtttggtaatagagcgagatttagttttaataataattattaaaaaaaaaaaaattattttttagtagtttttaatttaagtgataggatagttgtaagcgttgaataaatataatgtaaagtatatagtataatggttttgggatttttggtaaatgttaattatttttttttgtaggagagtaaaaaaatgatttttttttattttgttaggttttttggttagtttatgaattaaattaatttaagatagattaataggagaaaattatatttgattaagtatatatgtatgggagttttttaaaataagagattttaagaagggtttgatgattgaagtattttgagttatagaaaagaatacggtttggtggtcgggtgtagtagtttacgtttttaattttagtattttgggaggttaaggcgggtggattacgaggttaggatattaagattattttggttaatacggtgaaatttagtttttattaaaaatgtaaaaataaaattatttgggcgtggtggcggttgtttgtagttttagttattcgggaggttgagatagaagaatggcgtgaattcgggaggcggagtttgtagttagttgagatggtattattgtattttagtttgggttatagagcgagagtttattttaaaaaaaaaaaagaatagggtttggtgtcgggcgcggtggtttacggtttacggttgtgattttagttttttgagaagttaaggtgggtggattattagaggttaagagttcgagattagtttggttaatttggcgaaattttgtttttattaaaaatataaaaaattgggtaggtatagtggtttacgtttgtaattttagtattttgggaggttaaggtaggtggattatttgaggagtttaagattagtttgattaatatggtgaaaattcgtttttattaaaaatataaaaattagttgggtatggtggtatatatttgtgattttagttgttcgggaggttgaggtaggagaatcgtttgaatttgggaggcggagattgtagtgagtcgaaattgtgttatagtattttagtttgggtaatagagcgagatttaattttaaaaaaaaaaaaattgaaaaaattagttaggtatggtggcgggtatttgtaattttagttatttaggtagttgaggtaggagaatatttttaattcgggaggtagaggttgtagtaaattgagattatattattgtattttagtttaggtgatagagtaagattttattttaaaaaaaaaaataaaattggggtttggggttttcggagaggtaatgataagttataggagggtaagaggggaaatgtatggtaaagaaagattgttttgttatgtagataaaaagttttttaggtaataaaagttattttgaggtagttttttttttgatatagatacgttattaatgtagattttttttgtagatataaatttattttataaaaggatagttttttagagttatttttgtgtttatagttttttagaataattagtttaaaatatgttattaaagaagaatattttaggagagtatattttggttttttagagtgatatttgaggtggtatgttttggtttttaatatttattttttttagtttttttgaaagttttaagtgtatttgttgtgtattaaggatagaaagttttatagtttagttttcgtgttgtagaatattatgcgaagaggttagaggtagtttagtttgggaatggtaggtgggtgttttttatttttattgaaatttatgtgtaattatattaagattttttttttaaatttaaagtggttaaaaattaaattttttaaaagttttgttgatttaaattttaatatatatattttcgtgtgtgtttttttgttgttgttgttgttgttgttttgagatggagttttattttgttttttaggttggagtgtagtggtacgattttagtttattgtaattttttttttttcgggtttaagttgttttttggttttaatttttcgagtggttaggattataggtgcgtattattatatttagttaatttattgtatttttagtagagattagacgggtttttattatgttggttaggttggtttcgaatatttgattttaggtggttagttcgttttagttttttaaagtgttgggattataggcgtgagtttttgcgtttagtttaaattttaatatatattttatgtttaggtttttagaagtagttatatttttagtttaagtgaataatttagaatttaatttattaaattagtgtgagttttgttggttgttttattgttgaattagaattattttagggttgtttgtttatttgtttattagtttgtttttttttttttttttaaaagtttttttttttttttttttttttttttttttttttgtttttattaaatgtttatgatttgatatatagtaaatgtgttttgta

SEQ ID NO: 443 - DNA, 6577 bp, Artificial Sequence
  chemically treated genomic DNA (Homo sapiens)
gtattttagtttgggtaatagagatttttttttaaaaaaatgaaaagaaaatgttttaagatagagattataattataaatggaattagtatattattataagtttagtgaagggaagtatgttatttggggttaaagtgtacgggaaaggtaaatagtatgtttttgtttgttttgttttgtttgaaatagagtttggttttgttatttaggttggagtgtagtggagagatttcggtttattgttagtttcgtttttcgggtttacgttatttttttgttttagttttttaagtagttgggattataggtgtatgttattatatttagttaattttttttatttttagtagagacggggttttattatgttagttaggatggttttgattttttgattttgtgatttattcgttttggttttttaaaatgttgggattataggtgtgagttattacgttaggtcgtattttttttttaagtttttttatttttattatttaaaagttttattttttatttagttgattgtgtttgtgttttcgatatttttataataattttttgtttttcgataaggagagtatatttgatttagttacgaatatatttagtatatatggaattcgatatgttgttttggataatttcgtaagaattttaggttttacggtacgaattttttgaagtttgtttgggtatatgttatatgtagattttggtgtttttttatttattttggtataaaggtaaataattttattattaagggtttgggatagtttagttttgttagaggttgtattgtaggaaagtttacgttggtatgttaaacgttggattattttgagtgtttgtagataacgtttttggaagaggaagaagtggtaattagtattttaaagtagtagaggatttaaagtattttttgaaatttaagaggaagaaataataagtttaagaattagagagttgtattattttggagataggaagaagttaaaaagacgcggttgagttaagtatagtttatatttgaagttttttttttttttattaagaaggttgggttttgaatatttttggtagatatttttattattatttttagttataagttttaaaatgtagtatttgttggaggttgtagtgagttgagatcgtattattgttttttagtttgggggatagagtgagagtaaaattttgttttaaaaaaaattaaatttaaaaaatgtagtatttgtttatggttgttattaattattattttgttttgttatggttaatgtatagattattgtgaagatttcgttatttttaagcggtttattggtttttattagattttgtttttgattttttttgtagtgttggtattaatagtttttatttttttaggtagagtttttatatttaataatatagattttgatatgaaaattgtttttttttttttttttttgagatggagtttaagtttgtcgtttacgttggagtgtagtggcgtaattttggtttatagtaatttttgtcgttcgagtttaagtaatttttttgttttagtttttcgagtagttgggattataggcgtcggttattgttttcgattaatttttgtatttttagtagagacggggttttattattttggttaggttggtattgaattttagattttacgtgatttatttgtttcggttttttaaagtgttgagaatataggcgtgagatatcgcgttcggtttttaattttttataggtagttagaataggttcgagagagatttttttgaataatttttttttgttcgggcgtcgtggtttacgtttgtaattttagtattttgggaggtcgaggcgggtggattacgaggttaggagatcgagattattttggttagtacggtgaaatttcgtttttattaaaaatataaaaaattagtcgggcgcggtggcgggcgtttgtagttttagttattcgggaggttgagataggagaatggcgtgaattcgggaggcggagtttgtagtgagcggagatcgcgtcgttgtattgtagtttgggcgatagagcgagatttcgttttaaataataataataataataataataattttttttttgtcggtcgcggtggtttaggtttgtaattttagtattttgggaggttgaggcgggcggattacgtgacgtcgggagttcgagattagcgtggttaatatggtgaaatttcgtttcgattaaaaaaaaaaaaaaaaaaaaaaaatttagttgggcgtcgtggtaggcgtttgtaattttagttattcgggaagttgaggttggagaatcgtttgaatttaagaggcggaggttgtagtgattagagattgagttattgtatttttgtttgggtgacgagtaaaattttgttttaaaaaataaaataaaagtaaaaataaaggttgggcgtagtggtttacgtttgtaattttaggtttttgggaggtagaggtgggtggattatttgaggtcgggagttcgagagtagtttgattaatatggagaaagttcgtttttattaaaaatataaaattagtagggggtagtgcgggtgtttgtaattttagttattcgcgaggttgaggtaggagaatcgtttgaattagggaggcggaagttgcggttagtttagattatattattgtattttagtttacgtaataagagcgaaattttattttaaaataaataataaaaattaaaaaaataaaaataaaaataggtcgggcgcggtggtttacgtttgtaaatttagtattttgggaggttaaggcgggtagattacgaggttaggagattaaaattattttggttaatacggtgaaatttcgtttttttttaaaatataaaaaattagtcgggtggtggcgggcgtttgtagttttagttatttaggaggttgaggcgggagaatggcgtgaatttaggaggcggagtttgtagtgaatcgagatcgcgttattgtattttagtttaggtcgatagagtaagatttcgttttaaaaaaaaaaaaaaaatagggttaggcgtggtggtttacgattgtaattttagtattttgggaggtcgaggcgggcggattagaaggttaagagatcgagattatttggttaatatggtgaaattttatttttattaaaaatataaaaattagttgggcgtggtgtcgggtatttgtaattttagaggattataggtattttagaggttgaggtataagaatcgtttgaattcgggaggcggaggttgtagtgagtcgagattgcgttattgtattttagtttggcgatagagtaagattttgttttaaaaaaattaattaattaattaaaaaataaataaaaaatttttttgaaataggattttattttattatcgaggttggagagtagtggtattataatcgtggtttattatagttttggatttttgggtttaagtgttttgtttatttttgttttttaagtagttgcggttgggattataggttatattattatgtatggttaatttttttttttttttttttttttttttgtcgaagtagttttattatgttgtttaagttggttttgaatttttgggtttaagggatttttttacgttggttttttaaagtgttgggattataagtgtgagttatcgtaataggttttagataatattttttttttttcgtgtttcgtatttttttttatttttagtatatatatagtaagaataatttttttttaaaggtagagataaatttgttttttttttatttttttttttttttttttttttttttttttttgagacggagtttggttttgtcgtttaagttggagtgtagtggcgtaatttcggtttattgtaagttttgtttttcgggtttacgttatttttttgttttagttttttaagtggttaggattatagtcgtttgttattacgttcggttaattttgtgtgtgtgtgtgtatttttagtagagatggggttttattatgttagttaggatggtttcgattttttgatttcgtgattcgttcgtttcggttttttaaagtgttgggattataggcgtgagttatcgcgttcggtaaatttgtttttttatattcgtgttgtttatattttagttttttggttattaaggttatatatttatggtttattgagtgagattttaggagtattgtattttaagtgggttatattaaaagatttacgtaaagaatgatatttttagtttaaatttttgtttttttaagttatttggttagagaaattatatatgggtttttataagagagatcgttttaattgaagttttaggatgtgtttaggtaggttgtgtgtgttggggtggtggggtcgattttgtataattaatttacgtttttattttgttttattagggggtagattgatttaataaataatttatttttgcgtatttcgttttttttaaagtgaattgggatttatagaattaagggtttggataattaatagtaaaattttaggattgttttttatttagttttagaaatcgatgataatttattttttagtttcgttgaatagtatttttaaaatttagttttattttttttttttaatttttagtgttttttttatttttatttttatttttaaaatttttggttttttttttttaatttttttaaaattttttttttaaaatttttggtcgtcgtggttaaatttttatttttttttattttagtttttttggttttagaatggaagagtaaggttttaagaggggagttataattatcgaaaggttgtggaaaatagcgagagagataggtcggtttaagttaggaagggaaaatcgagagaatagaggtcgggttggtagttttggtttgtttaaaagggtgggcgggtagggggtggagttcggaggggtgtcgttttttttttttttcggagtttgggcggagagggaggaaaatttttttttggtttgggtttcgtgtcgttttgtttgttaatcgtttagtttcgtttattagtgtcgggcgttttttatttttttttcggttttttcggtgttcgttatggttaaagtttacgattatttttttaagttgttgttgatcggggattcgggggtgggtaagatttgtttgattattcgttttgtagaggataattttaataatatttatatttttattatcggtgagttcgttggttatgttttagatttcgatttttttgtgattttttttttcggttttcggattattagtgattttattttttagtttttttagagtaaggtttttaaattttagttttttaatttttggttttgatttttttttcgtgtatgtttttgtatagtaattaaattttttatttttttgaggtttttaggtaattttttaattgttgttagttttttatttttttggtattatcgttttagtttttttaaatttataagaatttttttttatttttttttgtttttttttttttttatttttattatttagaattttttcgattttatttttatgttttttgtatttttgttcgttatatttttttttttcgattcgatgttagtttttttttgttttgttgagttttaaatttttttattgtgtttttattttattatttattttttaggttttttgttttagtttttttgtattttagttgaataagggtttgggaagggtggaataaggtggttgggtgtgttggagggtggtttaaggattgtgattatgaatatgtagttagtttggtgaggaacgtggaaatgaggggatttttggggtttttgagttagtttggtgatttattttttttttaggggtttttagtaggtttgggggaggtgtttaagtttttattaagaagaatattgtttttttttttttttttttttttttttttattttttttggtttgggaaatagataggaagagttttacgataattttggttataaaggaaaaggaaaaatgttttttttttttaattgttttaaaagtaattttgtttagttttagatttttttagtgttaagtttggtttattagttaatttatatagattggttttagttatttttttttttattttttattaggagggtaggtgggatattaagagtagagggttttaagaaaatagagaagaggaatgtgaaagtaatatttggggggagatagagattgaatttagagagttgttagttggtataattgaatggatttaagaggtagtttaaggattttaagtttttatgtagaattttcgttatttttttttttttaaaatttataaaatgtacgtaaaaatagtatttttgttatataaatatagttttgggaaaatttttttagtttggtatttttaataagattgttttttaagtgttttttttgtagaatttttggtgttagtattgtttcgtttttgttttttttattatatagttttatatgtgtgtatgtatgttttaattttagtgtatattttttatttttagg

SEQ ID NO: 444 - DNA, 6577 bp, Artificial Sequence
  chemically treated genomic DNA (Homo sapiens)
tttaggggtggaaggtatgtattgaagttgagatatgtatgtatatatgtaaaattgtgtgatggaagggataggaacggagtagtgttggtattagaaattttgtaggggaggtatttggggaataattttgttggaaatgttaagttaggagaatttttttaaagttgtatttgtatagtaagaatattatttttacgtatattttatggattttgggagggaaaaggtgacgaaaattttgtatggaggtttaaaatttttaggttgttttttgggtttatttagttatattagttgataattttttgaatttagtttttgtttttttttagatattatttttatattttttttttttgtttttttagagttttttatttttggtattttatttatttttttagtagagagtaaggaaaaaagtagttgaagttagtttatgtgaattaattagtgggttaaatttggtattaggaaagtttgaggttaaataggattatttttgagataattaggaaagaggggtattttttttttttttttgtaattagaattgtcgtgagattttttttgtttattttttaagttagaggagatgaagaaagaagagaagggaggaggggagataatgttttttttagtagaaatttgggtattttttttaagtttgttgggggtttttgggaggaggatgagttattaggttgatttagagattttaaaagtttttttatttttacgttttttattaagttggttgtatatttatgattatagtttttgggttattttttagtatatttagttattttgttttattttttttaaatttttgtttagttgaggtgtagggagattggggtagggaatttgggaagtagatggtgaggtggggatatagtgggagagtttgaagtttagtaagatagaaagaggttagtatcggatcgggagaaaaagatgtggcggatagggatataggaaatatggagataggatcgagagagttttaggtggtgggggtaggggaagaggggaatagagaaaaatagagaagagtttttgtggatttggggagattaaggcgatggtattaagaaaatgaggagttggtagtagttgaagagttatttgaaggttttagagaggtgagaggtttggttattatatagagatatgtacgggggaagggttagagttaggggttgagggattagaatttaggagttttattttaaggggattgaaaagtggggttattagtaattcgggagtcggagaaggaggttataggagagtcggggtttgggatatggttagcgggtttatcgatggtggagatgtaagtgttgttgaagttgttttttgtaaagcgaatgattagataagttttgtttattttcgagttttcgattagtagtaatttgaagaggtggtcgtaggttttggttatggcggatatcgggggagtcgggggaggggtggggagcgttcggtattggtaggcgggattggacggttggtaaatagagcggtacggagtttaggttaggaagaagttttttttttttttcgtttaggtttcgggaaagaggagaggcggtattttttcgggttttattttttgttcgtttatttttttgagtaggttaaggttgttagttcggtttttgttttttcggttttttttttttagtttaggtcggtttgtttttttcgttattttttatagtttttcggtaattgtagttttttttttaggattttatttttttattttgaggttagagaggttggggtgaagggaagtagaggtttaattacgacgattagaaattttagaagagaaattttagagggattaggggaagagaattaagagttttgggaataagggtgaaggtagggagagtattagaaattgaaaaaaaaaaatggggttgagttttggagatgttatttaacgaagttagaagatgagttattatcggtttttggggttgagtaaaaggtagttttagaattttattgttagttgtttaagtttttagttttatgggttttaatttattttgaaaaaagcgggatgcgtagaagtaggttatttgttgagttagtttgttttttggtggaatagggtgaaaacgtaaattagttatatagaatcggttttattattttaatatatatagtttatttagatatattttggggttttagttggaacgattttttttatggggatttatgtgtgatttttttgattaaatagtttaggaaaatagagatttgaattaaaaatgttattttttacgtgaattttttaatatggtttatttaaggtgtagtatttttgaaattttatttaataggttatgaatgtgtagttttggtaattaggaagttgaaatatgaatagtacgggtataaagaaataagtttgtcgggcgcggtggtttacgtttgtaattttagtattttgggaggtcgaggcgggcggattacgaggttaggagatcgagattattttggttaatatggtgaaattttatttttattaaaaatatatatatatatataaaattagtcgggcgtggtggtaggcgattgtagttttagttatttgggaggttgaggtaggagaatggcgtgaattcgggaggtagagtttgtagtgagtcgagattgcgttattgtattttagtttgggcgatagagttagatttcgttttaaaaaaaaaaaaaaaagaaagaaagaaagagagtaaaagagaaataagtttatttttgtttttagaaaaaaattatttttgttatatgtgtgttgggggtggaaaaaaatacgaaatacgaaagaaagaaaatattatttaagatttgttgcggtggtttatatttgtaattttagtattttgggaggttaacgtgagaggattttttaagtttaggagtttaagattagtttgggtaatatagtgagattgtttcgataaaaaaaaaaaaaaaaaaaaaaaaaaattagttatatatggtggtgtggtttgtagttttagtcgtagttatttgggggatagaagtgggtagaatatttgagtttaagagtttaaggttgtagtgagttacgattatgatgttattgttttttagtttcggtgatagagtaagattttgttttaaaaaaattttttatttattttttaattaattaattaatttttttgagatagagttttgttttgtcgttaggttggagtgtagtggcgtaatttcggtttattgtaattttcgtttttcgaatttaagcgatttttgtgttttagtttttggagtatttgtaattttttgggattataggtgttcgatattacgtttagttaatttttgtatttttagtagagatggggttttattatgttggttagatggtttcgattttttgattttttgattcgttcgtttcggttttttaaagtgttgggattatagtcgtgagttattacgtttggttttattttttttttttttttgagacggagttttgttttgtcgatttaggttggggtgtagtggcgcgatttcggtttattgtaagtttcgttttttgggtttacgttattttttcgttttagttttttgagtagttgggattataggcgttcgttattattcggttaattttttgtattttagggagagacggggttttatcgtgttagttaggatggttttgattttttgatttcgtgatttgttcgttttggttttttaaagtgttgggtttataggcgtaagttatcgcgttcggtttatttttatttttatttttttaatttttattgtttattttgaggtggagtttcgtttttgttgcgtaggttggggtgtaatggtgtgatttgggttaatcgtagttttcgtttttttggtttaagcgatttttttgttttagtttcgcgagtagttgaaattatagatattcgtattattttttgttaattttgtatttttagtagagacgagttttttttatgttggttaggttgttttcgaattttcgattttaggtgatttatttatttttgttttttaaaggtttgggattataggcgtgagttattgcgtttaatttttgtttttatttttattttattttttgagataaagttttgttcgttatttaggtagaagtgtaatggtttaatttttggttattgtaattttcgttttttgggtttaagcgattttttagttttagtttttcgagtagttgggattataggcgtttgttacgacgtttagttaaattttttttttttttttttttttttagtcgagacggggttttattatgttggttacgttggtttcgaattttcgacgttacgtgattcgttcgttttagttttttaaagtgttgggattataggtttgagttatcgcgatcggtaaagaaaaaattattattattattattattattatttgagacggagtttcgttttgtcgtttaggttgtagtgtagcggcgcgattttcgtttattgtaagtttcgtttttcgggtttacgttatttttttgttttagtttttcgagtagttgggattataggcgttcgttatcgcgttcggttaattttttgtatttttagtagaggcggggttttatcgtgttagttaggatggtttcgattttttaatttcgtgatttattcgtttcggttttttaaagtgttgggattataggcgtgagttacggcgttcgggtaagaaaaaattatttaagggagtttttttcgagtttattttggttgtttataaaaaattaaaggtcggacgcggtgttttacgtttgtatttttagtattttgggagatcgaggtaggtggattacgtgaggtttggagtttaatattagtttggttaagatggtgaaatttcgtttttattaaaaatataaaaattagtcgggagtagtggtcggcgtttgtaattttagttattcgggaggttgaggtaggagaattgtttgaattcgggcggtagaggttgttgtaagttaagattgcgttattgtattttagcgtgggcgatagatttaaattttattttaaaaaaaaaaaaaaaaaggtagtttttatgttaaagtttatgttattgaatataaggattttatttaggaagatggaagttgttgatgttagtattgtaaagagggttaagagtaggatttggtaagagttagtgaatcgtttgaggatggcggaatttttatagtgatttatatattggttataataaaataagataatagttaatagtaattatgggtagatgttgtattttttaaatttaattttttttgagatagagttttatttttattttgttttttaggttggagggtagtggtgcgattttagtttattgtaatttttagtagatgttgtattttaaaatttatgattaaaaatagtaataagagtatttgttagaagtatttaaaatttagtttttttagtaagagagaagagagttttagatgtgaattatatttggtttaatcgcgtttttttgatttttttttatttttagagtaatataattttttaatttttgagtttgttattttttttttttagattttaaaggatgttttaaattttttgttattttaaaatgttggttattattttttttttttttagggacgttgtttgtaggtatttagaatggtttagcgtttgatatattaacgtaggtttttttataatatagtttttaataaaattaggttgttttaaatttttggtaatagaattgtttatttttatattaagatggatgggaaagtattaaaatttgtatgtggtatgtgtttaggtagattttaagggattcgtgtcgtaaaatttgaagtttttacgagattgtttaaaataatatgtcgggttttatgtgtgttaaatgtgttcgtgattggattaagtgtgttttttttatcgaggagtagaaaattgttgtgaaagtgtcgaaggtataagtatagttagttaaataaaaaatgaaatttttgagtaataaaaatgaggagatttaaaaaaaaaatgcggtttggcgtggtggtttatatttgtaattttagtattttgggaggttaaggcgggtggattataaggttaggagattaagattattttggttaatatggtgaaatttcgtttttattaaaaatagaaaaaattagttgggtgtggtggtatgtatttgtagttttagttatttgggaggttgaggtagaagaatggcgtgaattcgggaggcggagttagtagtgaatcgagatttttttattgtattttagtttgggtgatagagttagattttattttaaataaaataaaataaataaaaatatgttgtttatttttttcgtgtattttaattttaggtaatatgtttttttttattaaatttgtgatagtatgttgattttatttataattgtaatttttattttgaaatattttttttttatttttttgagagggagtttttgttgtttaggttggagtgt

SEQ ID NO: 445 - DNA, 5995 bp, Artificial Sequence
  chemically treated genomic DNA (Homo sapiens)
gtatatatttattaggatttttatataaatgtaattatatggtatttttggtttgagtttttttattttgtaattattttgagaattatttattttgttgtatgtattaatagtttatttttttttatagttgagttgtagtttgttgtaatgttgtattattatttttcgatttatttgttaattgatatttgggttgtttttagtttggggttattagaaataaagttggtatgaatatttgtatataattttgtggatatatgaagatatatttatgttgggtaaatatttgggagtaaagtggttaggaaatatagatgtgtgttttattttttttttttgagatagggttttgttttgtggtttaggttggaatatagtggtatgattatggtttattgtagttttgattttttaggtttaagtgattttattattttagtttttggagtagttgggattataagtatgtattattatgtttagttatttttttaaaaaattttttatttttgtatagaagaagtttttttatattgtttaggttggttttaaatttttaggttgaagtaattttttcgtttcggttttttaatttttaaagaaattattaaattgttttttaaagtgattgtattattttacgtttttattagtagtatattttttgtagtaattgttggtttaaatttttagattatttttaaaaagtggatgtttttttattaatgaattataagtattttttatatattttagatataaattttttgttagatatattttttataaatattttttgttagtttgtagtttgtttttttatttttgtaatcgtttttttttaaatttatttatttaaattgataggtaaaattgtatatatttattatgtataatatattgttttaaagtatatatatattgtggaatggttaatttagttaatttgtattattttatagttatcgttttttgtggtgagaatatttaatatttatttttttagtatttttttagaatgtattatattattattaattatgttacgatgttgtataatagtgtaatcgttttttgaagaataaaagttttaaatttagttaaagaataatttattgattttttttttgaattataagtttatgtttttttttgttttatttaagaaatgtttgttaaaatagggttattataatttgtttttttttagaaattttaagtagttttagtttttatatcgtgttcgtttgtaattttagttattcggagtttaaggtaggagaattatttgaatttgggaggtggaggttgtagtgagtcgagattgaattacggtattttagattgggcgatagagcgggatttcgttttaaaataataatagtaaataaaaaataaataaagtttttgaatttgttttggttttgagggttgttttaaaaaaaaaaaaaaaaaaaaagtttgatttaggttaagtaaaatcgagatgatttgtttatgtgtgtgtatataatatgtattatatgtaatatatgaattgtatataatttttatgtgtaataaatagtgggaaaatatttatatatttatatatgtataattaatttgaaaggaaagttaattggtattaagagaaaggagggaatgggattggggggaaaatgtatttttttttgaatttttttgtgtagtttgatattttttgtagtgtttatgagttatttattaggaaatattgttaaaggaaaaaataaaatgattgtgtatttaaagaatagttattgaatattatgttttatgtatcgttaggtatagtaattggaggttttgtatgttttatgttttgtttttttattttgtttttttagttatttagtttaaaatgttattattttgtttaaaaagattataggttatggaagaggaggtggagaatagggtgttaggaaaggttatttagagattatgatttttgagttaggaatatgaattatgtatagagtttgtcgaaagaataatagtttggggaggggaattaaagtttatggataaggaatagaatgtgtaaaatttttggatttgtttagggaatttgaagttgtataaggaagttaattgattaatttatatttttataatttataattttatattgaaggagaattattgttggggaaaagcgattgggatttagtggttttcgtttttgttgtttaatatttttttttttggggttttttattatgtaattagtattgatattattatgttgggttgttaatatgttttggatggttttgttaaatatgaatttataaggtttttttggaatatttggaggggattttattaaagggttagagatggtacggaagaatttgatatgaaaatttgatatgaaaagttatttggaatcgtaaaatttggtttatttatttttagtttgaggaaggggaggtttttgtttaaggtttttagtttttagatgttattttgttttttttatttgagtgtttttatttaagttttttttggtgatggagaaatttaagtttttatttttataagatagagggatgtggtttttttttattagtataattttattaggatgttatataaatgtttggtattttaggagttaggagtatttttatattgttagaggaggagagtatttggagaggttttttgtgttaggttatgtagggttttgtatgttatgttattatgtatttagaattttatttagtagataaaggaaattgtgataggaaatggttagaattgggtatgtaataaaaattatagaaatggatataaagttatagaggtaatgtgttataaggaaaataggatatttggtttttggttttggttttatttgtaattgatcggatgaatgtgaggaatcgtttggttttttaaagttttagagtataggttgcgatggtttgtgtttgcggttttagttatttgggaggttgaagagggaggatagtttgagttaagtagtttgaggtagtagtgagttaggatggtgcgattgtattttagtttgggttatagattgagattttgtgttttaataaataaaataattattaaaataaaaataatttaaaaaattatgagtggtttagtgtatttgtttattaagtaaaggagttaagtgttttttaaaagggttattttaagtatgacgttttttaattttatgtttagttagtttttaaatttaaagttatttgtaaagaaggtagtaattttttcgtgaaaatgtaggggttatagatgttaaatgtatattgttttgattgattgattgattgattgagaggaggttttgttttgttatttaggttggagtatagtgatttagttatggtttattgttgttttgattttttgggtttaggtgattgttttgttttagttttttgagtagttgggattataggtatatgttattacgtttatattatttattattattattattatttggagagatggagattttttttgttatttaggttggttttgaattattggttttaagtaatttttttattttgaagaataggatttttaagtttttttttgggttttagtttttttatttggaatatgtggataataattgtttaataaagtttatttaggattaaatgagataatgtatgtgaaaatattgtgtaaattatgaaaaatgtatatttaatatataaaattttttgtattgtataatttttggaaattatttgaggggttgagtgcggtggtttatgtatgtaattttaatattttgggaggtaaagtttggaggattttttgagttttggagtttaagaagattagtatgggttatatggtgagattttgtttttatagaaaattaaaaagaaaaaaaagaaattaatttgaggaattaaaggtttaattattatataaatttatggtttaaaattaagtttgtttttggttttattttatgtttttatttttttttttatgtatgatttataatattttgttatattttttataaatttataattttttaaattttcgaaaaaatatagggtataaataaaaattatataaattttatttaaaatattttttttagtttataaaaatttaaatatattttttaagaaaagttttttagataaaataatagaaataaattttttttttattaaatatagtatattttttggaattttttatttagtttgattttcggttatttttagttttttaggatgtgttgtggtaattttgttttttagttttatattatatatggtttgaaggttataattgtgaaattttaagattgtagtattatattttttagtgttttttaattaagttttttatgatatttttgagtataatattatattagaagtttgtatttgttttttttaattaaatttttatgtttatattttttttggttttaattatttttaggttttgggaagagggatagggtggagtggaatgggagaaggtggttgggaatattgtaattttgaggtttttgttttggtttttatggttttttagttattttttttgaaatggtatgtaaaattgataatgatgtatatatttgtatatgtatatttttatgggagagatttttttatgatttagaaataattaagaataattgtgaaatgtttttttttagttatttttaagtattataatagaattaattttttagtaaatatttaaatttagtattagtttgtttgtttgtttgttttttagagaagttttttattttcggcggttgatagtagtagcggcggcggcgggcggcgtttggcgtttcgaggttgagcggtatcggggttggggcgcggaggaggagtagtagcgggaggaggagtcgtgtgttttggtattgagcggtcgcggttatggcgtacgtttatttttttaagtatattataatcggcgatataggtgagggtttcgggcgcggtcgggcgggtgtcggcggttttcggattcgggttgaggggtaaacggcgtttggcggtggcggggacgcggattttattcggcgttttttttttggtcgcgtcgttttattttcgtagtgttggagttggtgacgtgggtattgcgagcggtcgcggtttggttaggttcggtttgcggttttcgattcggttagttttgtagttgagggtcgtggtagtcgtttgcgacgttcgatttaggaagtgtgtgataggaggggaggtttagcgtagggtcgtcggggttcgatttatatgattgtattttatttttagggttttttgcgttaggttttttcgcggttttaggaaaaagaaggagggaaatttaggggagtagaaggtgttggggttcgggttttggtttttgattagtttaatttttttttattagtacgtatttattaaggtttgggtaaggcgttttttggcgtgggataggtagtcgagaaagagaaaaggaaatttttaaaatatgtattttatatatatatatatatataaaatatgtttttttaatatttttaatttttacgttagaataagttatattttattatttgacggttggagaatttttttcggggttaggaaagtatgaacgagttttgtggatttttgttacgtgtgaattggggttatatagtaatgtaaagtcgtttagtgttttgggtgtgtatttaggtatgtgtatgttgaggacgttgatgttttagatatgttaagttcggtgttataattgttaatttttaggtgagtttatgtttatgagttgaaagaaatttagttatttttatttaaaatgacgttttagtatattttatagaaaagtaaatagatttttcgtagatatttttaatatttgtgatttggtattattttgaatttaataataaatataaagattgtttagatgttgtaattattaatatattagagtt

SEQ ID NO: 446 - DNA, 5995 bp, Artificial Sequence
  chemically treated genomic DNA (Homo sapiens)
gattttggtatattaatagttgtaatatttaaataatttttatgtttattattagatttaaagtaatgttaaattataggtattaaaaatatttacgaagagtttgtttatttttttgtgaaatatattaggacgttattttaagtgagaataattgaattttttttagtttatggatatgagtttatttgaaaattagtagttgtgatatcggatttgatatatttaaaatattagcgtttttaatatatatatatttaagtatatatttagagtattgaacgattttatattattatataattttagtttatacgtggtaaaagtttatagaattcgtttatgtttttttaatttcgaaagggattttttagtcgttaagtaatgagatgtgatttattttgacgtgagagttgaaggtgttaaaaaagtatattttatatatatgtatatatataaaatatatattttaaaggtttttttttttttttttcggttgtttgttttacgttaaaaagcgttttgtttaggttttgatagatgcgtgttggtggaggaaggttggattggttaggaattaagattcgggttttaatattttttgtttttttaggttttttttttttttttttttggggtcgcgaagagatttaacgtaaggggttttgggggtggggtgtagttatgtgagtcgggtttcggcggttttgcgttaggtttttttttttgttatatattttttgaatcgggcgtcgtaaacggttgttacggtttttagttgtaagattggtcgggtcgggggtcgtagatcgggtttggttaggtcgcggtcgttcgtagtgtttacgttattagttttagtattgcggaaatggagcggcgcggttaggagggaggcgtcgggtggagttcgcgttttcgttatcgttagacgtcgtttgttttttagttcgggttcggaggtcgtcgatattcgttcggtcgcgttcggggtttttatttgtgtcgtcgattatgatgtatttgaagagataggcgtacgttatggtcgcggtcgtttagtgttagggtatacggttttttttttcgttgttgtttttttttcgcgttttaatttcggtgtcgtttagtttcgaaacgttaggcgtcgttcgtcgtcgtcgttgttgttgttagtcgtcgggagtgaggggtttttttaaaaaataaataaataaataaattggtattgagtttaagtatttgttggaaaattagttttgttatggtatttggagatggttgaaggaaggtattttataattgtttttaattatttttgggttatggaagaattttttttataaaagtgtatatgtgtaaatatatatattattattagttttgtatattattttagaaggagtggttaaggaattatggaaattaaggtaaaaattttaagattatagtatttttaattatttttttttattttattttattttatttttttttttaaagtttgagagtaattaaaattaaagaaaatataaatatgaaagtttagttgggagaagtaaatgtaaatttttaatatagtattgtatttaaaaatgttatggagaatttgattaggagatattgaagaatgtagtgttataattttgaaattttatagttatgatttttagattatatatgatgtaaggttgagagatagagttattataatatattttaagagattgaaaatagtcgaaaattaaattgaatggaaaattttaggaagtatattatatttaatggaagagaggtttatttttgttattttgtttgggggattttttttgaaaaatatgtttggatttttatgggttaaagaaaatgttttaaatgaggtttatgtgatttttatttatattttgtattttttcgaagatttaagagattataggtttatagaaaatataataaaatattatgaattatatataggaaaaaaggtagagatataaaatagagttaggaataaatttaattttaaattatgaatttatatagtgattaggtttttagttttttaagttaattttttttttttttttttaattttttgtagagataggattttattatgtaatttatgttgatttttttgaattttaaggtttaagggattttttagattttgttttttaaagtgttggaattatatgtatgagttatcgtatttagttttttaagtaatttttaaaaattatgtagtgtaaagagttttatgtattaggtatatattttttataatttatatagtatttttatatatattattttatttgattttaaatggattttgttaagtagttattatttatatattttaaataaggaaattgaagtttagagaagaatttgaaaattttgttttttaaggtgggagaattgtttgaggttagtagtttaagattagtttgagtaatagagggagtttttatttttttaaataataataataataataaatgatataggcgtggtggtatgtgtttgtgattttagttatttaggaggttgaggtaggataattatttgagtttaggaagttaagatagtagtaagttatgattgggttattgtattttagtttagatgatagagtaagatttttttttaattaattaattaattaattagaataatatgtatttgatatttatggtttttgtatttttacgagaggattattattttttttatagatggttttagatttggaggttggttaagtataaaattaaaagacgttatgtttggaatagtttttttaagaaatatttaatttttttatttaatagataagtgtattgaattatttataattttttaaattatttttattttaataattattttatttattaagatataaggttttaatttatagtttaagttggagtgtagtcgtattattttagtttattgttgttttaaattgtttggtttaagttattttttttttttagttttttaagtagttgggatcgtaggtataagttatcgtaatttgtgttttgaagttttaagaggttaaacgattttttatatttattcgattagttataggtagagttaagattagaagttaggtattttattttttttataatatattgtttttatagttttatatttatttttatgatttttgttatatatttagttttgattattttttgttataattttttttgtttattaagtaaagttttaaatgtatggtgatataatatataaggttttatataatttggtataagagatttttttaggtattttttttttttaatagtgtaggaatatttttgatttttaggatgttaggtatttgtataatattttaatagagttgtgttggtgaaggaaggttatatttttttattttgtgagagtgaagatttgagtttttttattattaaggaagatttgggtgaaggtatttaagtgggagggataaaatgatatttgaaaattggaggttttgggtagggatttttttttttttaaattaaaggtgaatgaattaaattttgcgattttaggtagttttttatgttaaatttttatgttaaattttttcgtgttatttttgattttttagtaaaattttttttaaatattttagaaaaattttgtgagtttatatttggtaaggttatttaaagtatgttagtaatttagtatgatggtgttagtattaattatataatgagaggttttaaagagaagagtattaggtaataggaacgagggttattaaattttaatcgtttttttttagtaatgatttttttttaatatgaggttatgggttatgaggatatgagttagttaattagtttttttatgtaattttaaattttttgaatagatttaggaattttgtatattttgttttttgtttataaattttggtttttttttttaaattgttgttttttcgataaattttatatataatttatatttttggtttagaaattataatttttaagtaattttttttgatattttattttttatttttttttttataatttgtggtttttttgaatagagtggtgatattttgggttggatgattgaaaaagtaaagtagaaaaatagaatatagaatatatagggtttttagttgttgtgtttggcggtatatgaaatatagtatttaataattattttttgaatgtatagttattttgtttttttttttaatagtattttttaataggtaatttatgaatattgtaaaaaatgttaaattgtataaaaaaatttagggaaaagtatattttttttttaattttattttttttttttttttaatattagttagttttttttttagattgattatgtatatatgggtatgtaaatgtttttttattatttgttatatataaaaattatatataatttatatattatatatggtgtatgttatatatatatatataaatagattatttcggttttgtttaatttaagttaggttttttttttttttttttttttagagtagtttttagaattaggataggtttagagattttatttattttttatttattattattattttgagacggagtttcgttttgtcgtttagtttggagtgtcgtggtttaatttcggtttattataatttttattttttaggtttaagtgatttttttgttttagatttcgagtagttgggattataggcgagtacggtgtgagagttaaaattatttaaaatttttaaaagaaaataaattgtagtgattttgttttggtaaatattttttaaatgggatagagaaaagtatgaatttatagtttagaaaaaaaattaataaattgttttttaattgaatttaaaatttttgttttttaaaagacggttatattattatataatatcgtgatatggttaatgatgatatagtgtattttggaaaaatgttgaaagagtggatgttaagtgtttttattataaaaaacgataattgtgagataatgtaaattagttagattaattattttatagtgtatatatattttaaaataatatgttgtatatgataaatatatgtaattttatttattaatttaaataaataaatttgaagaaaaacggttataaaaatgaaaagataagttatagattagtagaaaatatttgtgaaaaatgtatttgataaaggatttatatttagaatatatgaagaatgtttataatttattaataagaagatatttattttttaaaaatgatttaaagatttgaattagtaattattatagaagatatattattgatgggaacgtaaaatgatataattattttggaaaataatttggtagtttttttagaaattaaaaggtcgaggcgggaggattgttttagtttaggagtttgagattagtttgggtaatgtagggagattttttttatataaaaataagaaattttttaaaaaagtagttgaatatggtggtatatatttgtagttttagttattttagaggttgaggtggtaggattatttaagtttgagaggttaaggttgtagtgagttatgattatgttattgtattttagtttaggttatagagtaagattttgttttaaaaaaaagaaataaagtatatatttatattttttagttattttatttttagatgtttatttaatataaatatgtttttatgtgtttatagaattatgtataaatatttatattagttttatttttaatagttttaaattggaaataatttaaatattaattaatagatgaatcgaaaaatagtgatatagtattataatagattataatttagttataaagaggaatgaattattgatatatgtagtaaaatggatgatttttaaaataattatagagtgaaaaaatttagattaaaaatattatgtgattatatttatataaaaattttagtaaatgtgtat

SEQ ID NO: 447 - DNA, 6130 bp, Artificial Sequence
  chemically treated genomic DNA (Homo sapiens)
  unsure 1717: n is a or g or c or t
gaatttttgattttaggtgattcgtttatttcggttttttaaagtgttgggattataggtgtgagttatcgcgtttagtcgaagagtgtttaatttttattgataggaatggataagtaaagagttttaaagattaatgtgaaatattgtataaatattatagatgtttataatagtgatttggaatattgtaagtatcgagatagttttttgatttttaaagaaaaaagttaaattatatgtagtttggtttattgttttttttttttttttttttttttttttttgagataggtttttgttgtttagggtggagtgtagtagtgcgatttgggtttattgtaatttttattttttaggtttaaataatttttttgttttagttttttgagtagttgggattataggcgtgcgttattgcgttcggttaatttttatattttttttttggtagagatggggttttattgtgttggttaggcggttttaaatttttggttttaagtgatttgtttgtttttgttttttaacgtgttaggattataggtgtgagttatcgtgttcggttaattttgtgtttttaagtttcgtaattataattaattttttaaaaaagggtttattacgtgttagttatttttttatgtattttaaataaattaatttattttttttttataattattttgtgggggggtattattgttattattatttttagaaaaggaaattgaggtatagagaggtggtttaatttagttaaatttatatagtgagggagtggagtggtagaggggtgtggttttaggttttggagggttttttttatacgttagattatgcgtttatcgttagaagttaggtttttaggatttgttagagatgtaattttaggagtagggtttttgttgtttaaatttttgttttttttagaggggttatggatgtatgtttataatagaaagggtattttttgagaaagggaataataataattattttagaaattattatttttgaatgtttgttttgtgttaggtataggtaagatattttttgtttgtttaatttttagaatattattatagggttattatattatttttattggataaaagaggaagtagagaggttttagtaatttttttaaagttataagttgtggagttaggtttgaattgaaagtagtttttgattttagaattttgtttagtatttttgtttttagttttatggttcgtttggttttttttagtattttaatgggtttgaaggtaattaagttatggtatgtggattgtggggtgatgggttttatttattattttgtttagttttttattttttagatgcggatttttttttttggagatagagtttcgtttttgttgttttggttagagtgtaatggtacgatttcggtttattgtagtttttggttttagggtttaagtgatttttttgtttagttttcggagtagttgggattataggtatttattattatatttggttaattttttgtatttttagtagagataaggttttattatgttggttaggttggtttcgaatttttgattttaggtgatttattcgttttggtattttaaagtgttgggattataggcgtgagttatcgtgtttggtttagatgggggtattttgatgatgaagaggaagagaaagaaaatgtattttttttttttggggtttnttattacgtttgtgatattttatttttattttttttttaatttgttattttattgattttttttaattggattttttttagtggttagtttttgttttgaaagttagggatgatttagttttaggtatggttattttatttaggggtgaggtagaagtattttttttaaagttttgtttattaggagttttcgtttttatattataggtttatatttagtttttaggattagttagtttatgtggtttttttttaattaataaattagtaattaatttgttaggtgcggtggtttgtgtttgtaattttagtattttaggaagttgaggtaggtagattatttgaggttaggagttcgagattagtttggttaatatggtgaaatttcgtatttattgaaaatataaaaattagtcgggtatggtggtatgtattcgtaattttagttatttaggaagttgaggtaggagaattatttgaaattaggaggtagaggttgtagtaagttgtattttagtttggtgataagagtaaaattttgtgttaaaaaaataaagaaaattaaaaaataaagaaaaatataaaaaatttttttatttgttaaaaaaaaaaaaatttatcgtgaattaaaaattagtaaaaataatgaattaaaattttgtttttgtaaaatgtatgataataaaatgttaaggaaggttatgtgtcgttatggtttattgtagttttgaatttttgggtttaagcgatttttttgtttcggtttttttagtagttgggattataggtttgtgttatcgtatttagtttattttttttttttattttttgtagagataggagttttgttttgttgtttaggttggtttttaatttttagtttttagtgatttttttgttttagttttttaaagtgttgggttgatgggatatttttatatatagtgttatgttattataaatgagaagttttaaaaatattgattttaaaaattaatttatgttaagaatttttataattaaagttaaaaaattaaataaaaaatatgaaaagggttaatatttttgagaggtgatgagaatttataagttaataagagaaaataaatatttttataaatgaataagttaaggatatgaatgggtaatgtatataagaaatgtaaatgtttagtaatatgttaaaatagatttattattattaataagttatttttattttttagttggtagagttgttttgaaaaatagatatgtaatgatggtggaaaagattggtttaattatttagtaggaaaatttggtaattagaagtgtattaaaagttttagaatgttttataattttagattgggaaattttatttttagaaattaatttatttttagaaataattatgagtgtgtataaagatattattataaaaatattttatagtattatgtttaatagagaagaattagaaataatttaaatttttattaatataggtttgttaaaatatattttgtatatttatttaatggtatattatgtttttattataaattatgttttagaatatttaatagtatggaaaagtgttaatagtatttttttaatgaaaaaagtttataaaatagtttgtgatgattttatttaaaatgtgtgtttatttatagaataaagattagaaaaataaatattgatatattaaagggttattttatggtaaattgtaaatgattattttttttttttgtggtttatttgtatttttgaagttttttataatgtaaaagaatattttatgatatgaaaattataatataatttataatataagaaagaataattcggtcgggaacggtggtttacgtttgtaattttagtatttttggaggtcgagatcggcggattacgaggttaggggtttaagattagtttggttaatatagtgaaattttatttttacgaaaaatataaaaattagttaggtatggtggtgcgtgtttgtagttttagttattcgggaattgtttgaattcgggaggtggaggttgtagtgagtttagatcgtattattgtattttagtttgagtaatagagtgagatttcgttttaaaaaaaaaaaaaaaaaaaaaaagaataattaatagaaaatggttagatatttttttagtgttttttaagttaggaggattttagtagggtagggatttttatggtttttttttatttggagtattattggaggtttttttcggttttttcgttaagtggaatttagttttcggtaaaattataaagtaattaaaagtttgggaggtggaagaaatgtaatcggtagattttatagagtttgtgtaagaaattgatttaatgagaatttagttttttcgtttatagtttttttaaatagaaattaaggtcgattttaggggtttgtttaaatttaggtaagtaatttaataaggtgaggttatgattttatggttttttcgttttgttatatgttgatttagattaaagtttttatattttaaagtgtatagaaatttagttaaaatgtagattttgatttaggttaggggtgggtttgagagtttgtatttttaattagtttttaggcgatgattacgtacgggataggtttgggattatagtttaattagtaatggtgtagaatatagaatttgtagtaagaaggttagttttttaattttagttttgttacggattaattgaatgatagttgtttcggttttcgagttttcgtgaagatgtagtgagttattatatcgtgaggttttcgagtagcgtttattaagaattagttttgatattatttatcgtattttttagagtaagtagtcggtgaagtagggtttgacgaatgaataagtgaatgaatgatttttggagaaaaattgttttttgggtgattagagttcgagaagtaaaatgggagggttcgtgggtgggtaggaggtttattttttagaaagttttttgtattcggtggtttagagggtttggagtgttcggaagtcggtcggtttgcgtttagcggtttaatggggtcgcgggagggaggggagagcgtttagttaatttttttcgttcggggcgtcgtagtttcgtttttcggagcgttgcgacgttcgagtattttacggttgttatatcgtcgcgaggggcggggcgtttgttagggaagcggcgcgcgcgcgcgggcggcgggcgggttggggattcgtcgcgtagtgttagcgttagcgttagattcgcgtttcgcgtttttcggttcgtcgtttgttttgggattcgcgagttcgtattttcgttttgtttgttcgttgttcgagtatggagttgttgtgttgcgaaggtattcggtacgcgtttcgggtcgggtcggattcgcggttgttgggggattagcgtgttttgtagagtttgtttcgtttggaggagcgttacgtatttcgcgttttttatttttagtgcgtgtagcgggagattaagtcgtatatgcggaagatgttggtttattggatgttggaggtatcgttcggacgcgttttttttttttatcgttttcgggtttggatatatcggggtcgttttgtcgggatatttcggtttttatagtaatttgtaggatgtttcgaggttaagattttcggggtttggttttttattagggtatttacgttagttgttttttttgttttttcgagttttaatcggtttttttcgatagtgattgttagttatttggtattttaattgtgttttttttcgggtcgagtaaacgggattaaggatattttttttttttcggttttttatagcgtttttcgttttttttcgtttttcggtttttttcggagagcgcgtttggaaaattttgggttcggtcgttttcgttcgggagtcggtttttgtgtttttcgcggggttttggcggggaaggcgatgggggtggcgcgcgttttgtttcggtcgatagggaaatgaaaagtgtaggaggtagcggtaggagttttttttttttttttcgggtgtgtgtagtggtggcggtgatgggggtgaggttttagttttttggttattatgggtgatttttgcgttttattttttttcgttgtgggggaggggagttttcgtttggaatttttcgtgagtaagggttttttggttttattattttttcgttaaggggagaggggaggaggtcgcgtagaggaagtggggggcgttattttggggagggcgtattttttttttttattggtttttgtttttttaagtagtttattttttttgtcgtttttgttttttattttattttattttagcgtttttattttttcgttgttgtgttttttacgttttagatttagtagtgattgtgcgtttttttttagg

SEQ ID NO: 448 - DNA, 6130 bp, Artificial Sequence
  chemically treated genomic DNA (Homo sapiens)
  unsure 4414: n is a or g or c or t
tttgggggagggcgtatagttattgttgggtttggagcgtggggaatatagtagcgggggggtgggagcgttgaagtgaggtgggatagggagtaaaaacggtagagagggtaagttatttagagagataaggattaataaaggaggaggatgcgttttttttaaggtgacgttttttattttttttgcgcggtttttttttttttttttttgacgggggagtggtaaagttaaggagtttttgtttacggaggattttaaacggagattttttttttttatagcgaggggaagtgggacgtaagggttatttatggtagttagagagttgggattttatttttattatcgttattattgtatatattcgaggggaagggaggaggtttttgtcgttgttttttgtattttttatttttttgtcggtcggaatagggcgcgcgttatttttatcgtttttttcgttagaatttcgcgaaagatataggaatcggttttcgggcgggggcggtcgagtttagggttttttaggcgcgtttttcggagaaggtcgggaggcggagggaagcgggagacgttgtgagaagtcgaaggggagagagtgtttttggtttcgtttgttcggttcgaagagaggtatagttagggtgttaagtgattggtagttattgtcgggaggagtcgattagggttcgggaaagtaagggaggtagttggcgtgggtgttttagtgaaaggttaggtttcgggagttttagtttcggagtattttgtagattgttgtggggatcgggatgtttcgatagggcggtttcggtgtgtttagattcgggagcggtgggggagggggacgcgttcgggcggtatttttagtatttagtaagttagtatttttcgtatgtgcggtttgatttttcgttgtacgtattggaagtaggaggcgcggggtacgtagcgtttttttaggcggagtaggttttgtaggatacgttggttttttagtagtcgcgggttcggttcggttcggggcgcgtgtcgggtgttttcgtaatatagtagttttatattcgggtagcgaataggtagggcgggagtgcgggttcgcgagttttaaggtaggcgacgggtcggagagcgcggggcgcgggtttggcgttggcgttggtattgcgcggcggatttttagttcgttcgtcgttcgcgcgcgcgcgtcgtttttttgataggcgtttcgtttttcgcgacgatgtagtaatcgtggaatgttcggacgtcgtaacgtttcgaggggcggggttgcggcgtttcggacggaaagggttggttgagcgtttttttttttttttcgcggttttattgggtcgttgagcgtaagtcggtcggttttcgggtattttaggttttttggattatcgggtgtagagaattttttaggaggtgggttttttatttatttacgggtttttttattttgtttttcggattttagttatttaggaaataatttttttttaaaggttatttatttatttatttattcgttaaattttattttatcggttgtttgttttaaggaatgcgataaataatgttagagttagtttttagtgaacgttgttcgaaagttttacgatgtaatgatttattatatttttacgaaaattcggaaatcgaggtaattgttatttagttggttcgtggtagagttaggattgggaagttggtttttttgttgtagattttgtgttttatattattgttagttaaattgtgattttagatttgtttcgtgcgtggttatcgtttgggagttggttagaaatgtagatttttaggtttatttttaatttgaattagaatttgtattttaattagatttttgtgtattttaaagtatgagagttttagtttaagttagtatataatagaacggaaaggttatggagttatggttttattttgttaagttgtttgtttaggtttggataagtttttaaagtcggttttagtttttgtttggagaaattgtggacggagaaattagatttttattgaattagttttttgtatagattttgtgagatttatcggttgtattttttttattttttaaatttttggttattttgtagttttatcggaagttagattttatttgacgaagaggtcgaaaaagatttttaataatgttttaaatgggaggaggttatgaggatttttgttttattggggtttttttgatttaggagatattaaggaagtgtttaattattttttgttaattattttttttttttttttttttttttttgagacgaagttttattttgttgtttaagttggagtgtagtggtgcgatttgggtttattgtaatttttatttttcgggtttaagtaattttcgagtagttgggattataggtacgtattattatgtttgattaatttttgtatttttcgtagagatggggttttattatgttggttaggttagttttgaatttttgatttcgtgattcgtcggtttcggtttttaaaagtgttgggattataggcgtgagttatcgttttcggtcgaattatttttttttatattataaattgtattgtagtttttatattataaaatatttttttatattgtagaaaattttaaaaatataaataagttataaaaaaaggaaataattatttgtaatttgttatgaaataattttttaatatattaatgtttatttttttaatttttgttttatgaataaatatatattttaaatggaattattataaattgttttgtaagttttttttattaaaaaaatattgttaatatttttttatgttattaaatattttaggatataatttgtaatagggatataatatattattaggtgaatgtataaaatgtattttggtaaatttgtattggtggaaatttaaattatttttagtttttttttattagatataatattgtaaaatatttttgtggtaatatttttgtgtatatttatgattatttttagaagtgaattaatttttagaagtggaattttttaatttaaggttatgaaatattttaaggtttttgatatatttttaattgttaaatttttttgttgaatagttaaattaattttttttattattattatatatttattttttaaaataattttgttaattagagagtgaaagtggtttattagtaataataaatttattttggtatattattagatatttatattttttatgtatattatttatttatgtttttagtttatttatttatagggatgtttgtttttttttattgatttataagtttttattattttttaaagatattaattttttttatattttttgtttggttttttaattttggttataaaaatttttgatataaattaatttttaaaattagtatttttaaaattttttatttatagtaatatggtattatgtataaaaatgttttattagtttagtattttgggaggttgaggtaggaggattattggaagttaggagttgaagattagtttggataataaagtaagatttttatttttataaaaaataaaaaaaaaaaataagttgggtgcggtggtataagtttgtagttttagttattagggagatcgaagtaggaggatcgtttgagtttaggagtttaaggttgtagtgaattataacggtatatgattttttttaatattttgttattatatattttgtaaaaataaaattttagtttattgtttttattaatttttggtttacggtggatttttttttttttaataaatagaagggttttttgtgtttttttttgttttttggttttttttgtttttttgatataaagttttgtttttgttattaggttggagtgtagtttattgtaatttttgttttttggttttaagtgatttttttgttttagttttttgagtagttgggattacgggtgtatattattatgttcggttaatttttgtatttttagtagatacgggattttattatgttggttaggttggtttcgaatttttgattttaagtgatttgtttgttttagttttttaaagtgttgggattataggtataaattatcgtatttggtaaattagttgttgatttattaattgagggagggttatatagattgattagttttgaaagttggatgtgaatttgtagtatggggacgggagtttttggtgagtaggattttaggagagatatttttgttttatttttggatggaatagttatgtttagagttagattatttttgatttttagggtaaggattggttattggggaggatttagttagaaaaagttaataaaatggtaaattggaggaggggtgggaatggaatgttataggcgtaataanaaattttaaggaggaaagatatattttttttttttttttttttattattaaaatatttttatttgggttaggtacggtggtttacgtttgtaattttagtattttgggatgttaagacgggtggattatttgaagttaggagttcgagattagtttggttaatatggtaaaattttgtttttattaaaaatataaaaaattagttaggtgtggtggtggatgtttgtaattttagttatttcggaggttgagtaggagaattatttgaattttggagttagaggttgtagtgagtcgagatcgtgttattgtattttagttagggtaataagagcgaaattttgtttttaaaaaaaaaagttcgtatttgagaagtgagaggttgaataaggtgatgggtgaggtttattattttatagtttatatgttatggtttagttatttttagatttattgagatgttggggagagttaagcgagttatggggttgagaataggggtgttaaatagggttttggagttagagattgtttttagtttaaatttggttttatagtttatgattttgagagaattattggaatttttttgtttttttttttatttagtggggataatataatagttttataatgatgttttgaaaattaaataagtagaaaatgttttatttgtgtttggtataaagtaagtatttagagatagtagtttttgaaatgattattattatttttttttttaaggagtattttttttgttatgaatatgtatttataatttttttaagaaaagtaaaagtttgagtagtaagagttttatttttagaattgtatttttagtaaattttgaagatttggtttttaacggtaaacgtatggtttagcgtatggagaggattttttagggtttggagttatatttttttgttattttatttttttattgtgtgaatttggttaagttaaattatttttttgtgttttagtttttttttttaaaaatggtgataatagtagtatttttttatagagtggttgtgaggaggaaatgggttgatttgtttaaaatatatagaagagtggttggtacgtggtgaatttttttttaaaaagttagttgtgattgcgggatttaaaagtataaagttggtcgggtacggtggtttatatttgtaattttagtacgttgggaggtaggggtaggtagattatttgaggttaggagtttgagatcgtttggttaatatagtaaaattttatttttattaaaaaaaaaatataaaaattagtcgaacgtagtggcgtacgtttgtagttttagttatttaggaggttgaggtaggagaattgtttgagtttgggagatggagattgtagtgagtttagatcgtattattgtattttattttgggtaatagagatttgttttaaaaaaaaaaaaaaaaaaaaaaaaaaaaagtagtaaattaaattatatataatttagtttttttttttgagaattaaggagttatttcggtgtttatagtattttaggttattattatgagtatttgtaatatttgtataatattttatattaatttttaaaattttttgtttgtttatttttattagtaaaaattgagtatttttcggttgggcgcggtggtttatatttgtaattttagtattttgggaggtcgaggtgggcggattatttgaagttaggagttt

SEQ ID NO: 449 - DNA, 6012 bp, Artificial Sequence
  chemically treated genomic DNA (Homo sapiens)
taagtaataggagttttttagagaatttatttttgtatttttttttgagttttttttgaagcgaggattgataaggagtggatttagtaaataaaaatttagaagttgagagggcgtcgaatgtaagtcgatgagtgaatgtttaatgatagttgtgttgttgagtggtttaattattttttttagatttgttgttttttattttattattgattggaggtttattttgttttttggaatagtttttttggtttttgaagaagttatatttattagtaattttattttggaatgttcgttgggttttaggtattatttttggtattttatgtgtgtttttataatagttttgtaaagtaagttatattgttttgattgtatagatggggaaagagaggtttaggaaagttaagtaaatgtgttttaaggaagttataaagtgataggtttgatagggatagtggtagaggttgtgtgtttttgtattttgtgtgtgtgtgtgtgtgcgcgtacgcgtatttatttggggtatgtgtttttatttggggtgtgtgtttttatttggggtgtgtgtgtatgtgtttatttggggtgtttgtgtgtgtgtttatttggggtgtgtgtgtatgtgtttatttgggtgtgtgtgtgtttatttggggtgtgtgtgtgtgtttttatttggggttttttttttatgtagggggttttttttgtgtttttttgtcgttatattttttgttttttgagatatttttttttttttgtattttgggtataggttttgtggtaggtggttttggtgtttttgtattttgggtaagttatttagtgttttgttttgttttttgtaaaatgagtataatagttttttttttatgggatagtcgtgaagattaaattatttaatattttaaagtttgaaggagttttagcgtatgcgatgatagtattgagtaagtgttgtgtttaggtgattgtgaatttgtttttttttaatatattttgtttgtgttatgggttagtttttggtattttttattgggtttatggttgtgttatttgtattcgagtgttggggatggttaggtgggaaaaaggatttgggtttttaatgtatggtgagaaagataggagtaagtagataattatatagtggatgaaagtttatttttatttttgtttggagagagaggtttgagtatagggaagatttgtttaattttaggaggttagggaaggtattttaagggaggtgatgattcggttgaggtttgagtaggtagaggaagttgtacgtgtaagtttttgagtaggtgttatggaggaggggttggaaggagatttggtggttggagtgaggagattttatagggcgtatcgtttaggttttttttgtaatagtagtggggatttttggaaagttttggggagagggtagggatatgattttatttttaagttgaaaatttgtttttgtagtgagtattgtggattggatagttgttagttgagggttttagaatgatttaagtaagtggtgggttgtgttaggggtggagtttgaaaggagagattttgagaggcgtttacgagtttatacgtaagtgggttttattgtggtggaggggaggagggaaggtcgattttcgggtttttcgttttgttattgcgtaagtagtaggtacgtgttgtaggaagagttggtttaggtatagggtaggagtgtggggttggttgtgttaaattggagttgttttgtagataggaggagaggacgaggaggtagttggttttgagaaggtttattttttagagttattgaaagtgggaggtcgaaaagtgtttgtgggacgggacgttcgtttggttttgggtttttgttgatttttttgaagatggatagagaagatatagagttattagaaagtttagatattagggtttttttggatttgggtttaaattttgtttttgtagttttgtgattttgagtaagttattgattttttaagtatagttgttttgttgtttatttggtttgtttggaggatggtggtagttgttaaatgagttagtggatttaagcgttattaaatggtggttgttattgggttattatttgtataagaatttagaagtaggtatttatttagatattgtattagaggagtacgttttagttaggatgtagatgttgtagtagaggggtatattttagttaggatgtagatgttgtaatagaggggtatattttagttaggatgtagatgttgtagtagaggggtatattttagttaggatgtagatgttgtaatagaggggtatattttagtcgggatgtagatgttgtaatagaggggtatatattagttaggatgtagatgttgtagtaaaggggtatattttagtcgggatgtagatgttgtagtagaggggtatattttagttaggatgtaggtgttgtagtagaggggtatattttagtcgggatgtaggtggtgtagtagaggggtatattttagtcgggatgtagatgttgcggtagaggggtatattttagtcgggatgtagatgttgcggtagaggggtatattttagtcgggatgtagatgttgcggtagaggggtacgttttagtcgggatgtagatgttgcggtagaagggtatattttagtcgggatgtagatgttgcggtagaggggtatattttagtcgggatgtaggtgttgcggtagaggggtatattttatttaggatgtttttgtttgtcgtttaggatttttatttagagtgggtgattatatttgtagtgtagttttatagttggttgggaggtagtttgttttatgggtttttttgtttttttttgtttttaggtaggtgatttaggattttttttgttgtaagagaaagaaggagttgtttgagtgagttatttgttttgttttggtttttttgtggggttagagtaagtgggtatttttagaagtaattatggatcgttttttgtgtatttattgtagttttgtttattaaaatatttgtaagttttagtttttatagtttaatagaataaatagcgaaagtagaaagtttagttgataaggatgttaaaagaaaagaatgttttgattaattttatttttttttttaattgggagtttttttaatattatttaatttttttcgttgaaaataaagtatattaagtattgggttatatgattattttaattgtagttattttggagagtttaggttatttttttatttattattttattgggttatagtaattttagagttggtagggatttgttttatgttggtgttattgatgaagattttaagtttgtgataggtaaaataatttgttttaagttatgtagttgatttatgggtttagtttaaggtattcggtgtgtaatttttattttattttattggaggttattggtttagtttaggtttttatttttttatttaaagtttttttatttttagttgttggttgtttatttttttttgtggttttaaattttttttattttatgaaagaggttgttaggagagaaaattttggaagtttttttcggtttaatggttttggatgttttttgttttttttatgttttggagaggtgttttttttggtggtttggtaggaaagagtttttttagggatttttaggtttttttagggttgtagttaagtttggggtttggtcgggtatggttgtttcgaggggttaatatggattttagggtttgcggtttgtttagtaggtgggtgcgggttttgtttttatatagtttttttggggattggtaggtgtggagtggggggtttagaggttcgtaggttattattttttgttttcggtgtttttgtagttgtggagatataaggaattgttacgtgtatgatttagagtggttttaaggttagtggttaaagttattaggaaagttttgggagtattcgttaagaggttgtgtgtattgtgagtaggaggtttatggagttagattttgtagttagggtagtttgtttggaggagggggtatttaggaggggttttagtaggtttgagtaggtagaagggaggaacgtagttattataagtttgggaatagttaagtatagatatgagtgtgtttgagtaatttttagtattatttatgggtaatattattagtttatggggaattcggaggtttggaaaggatgggtgggtaggggttagcgggatatgagaagaggttgttttatgtaggtgtttagaaagttaaggataggtttaagtatttattgtgttttattatgggttaggtgttttttacgtttcgtttaatttatattttatgttagttttggtggttagtattattagagttttttaaaaagaggagattggttttgagggatttggatagggtaggaagtttggtttgtggagagttatttagtagtgttgttagattatttttaggttatcgtttgtttagggtagagatttagaattttgatgggggtatcgtgatggggagtagtttggaattatagtggaagagtttttggttttagggtgtagggtatttttgtgttgggtaagttttttttttttttatagttatgtaggtgtgcgatagtagttggtgagggttgagggtatagttatgtgtttatatatatgtgtgtatatgtatgtgtatatatgtttgcgtgtgggtgtatataagtgtttgtatgtatgggtgatgtgtgtatttgcgtatatgtgtgtttgtatgtatgtggtgtgtatatttaaagtaatagttttttagagtttcgggcgattttagaattgaggattttagtacgtagaagtatttgtttgtgttaggatgtttttcgttgttatgttttcgtgttttttttgttttgttatagtaggttgtttagtaggttttggagagatagttaaaggtttagatattgcgaagagtttgggggtcgttatttaggtttttgtttggtaaatgttttattagggggtattttagtggtgattttaggtataacgtgatttgtgattttggagtatttatttttatttttttttttttttatggaattttttatagtagtgggaataggtaagtttttgttatatataatagtatggagaaattttataaattgattatgtggatgaaggaggttagatatgaaagagtatttaaaaattttatttatataaagtttaaaagtaggtaataagaagttgtgtgttagaagttaggatagtagttgtttttgggttggaagatggagggggtttgtggataatggttaagtattgttttttgatttggggttggttttttaggtgggttaatttggtgagaggttatcgaattgtttatttatgattcgtgtatatttttgttatgaggtaagtattgttggattttagttttggtttttgtatttagtggtaaatatattatgtttagtgtttatatttattcgtttaaatattttatatgtatttttttagtttttattatattttgcgttgtttagtttattttatagattaataaattgaggtcgagaggtgatatttttcgtttaagagtttatagttggaaagtcggtaaagttaggatttttattagattatttttgtaggttttttttattttttatttatatgttatttttttttttatttttagtgatgttgatttgttttgtgttgattattttatagtgtttcgtttttttagttcgcgggtgacgtttcgtttgagtcgtaagcgggcgttgtttatttttttatttttagacgttagtttggatttgtagcggatgattcgtattttatttaattcgttagtggtttatattaataattttcgaagtagttcggcggttagcggtttttacgggtatttgttagcgggtgtttttaggtgagtttcgtttgtaagtagagagttgaggattagagttgggtt

SEQ ID NO: 450 - DNA, 6012 bp, Artificial Sequence
  chemically treated genomic DNA (Homo sapiens)
agtttagttttggtttttagttttttgtttgtaggcggggtttatttgagggtattcgttgatagatgttcgtaggaatcgttggtcgtcgagttgtttcgggagttgttgatgtaggttattagcgagttgggtgaggtgcggattattcgttgtaggtttaggttggcgtttgagagtggggagatggatagcgttcgtttgcggtttaggcggggcgttattcgcgggttggagaaacgggatattgtgggatagttaatataagataggttagtattattggggatgggggagggggtgatatgtgggtgggggataggaagagtttgtaaggatggtttaatgggaattttagttttgtcgattttttagttgtgggtttttgggcgaaggatgttatttttcggttttagtttgttgatttgtaaaatggattgagtagcgtagggtgtggtgaggattggagaagtgtatgtaaggtgtttgggcgagtgaatatgagtattgagtatagtgtatttattattgggtgtagagattagggttggaatttagtaatgtttattttatgataggagtgtgtacgaattataagtgagtagttcggtggttttttattaagttagtttatttgggaagttagttttaggttaagaaatagtgtttggttattgtttataggttttttttattttttagtttaagggtagttgttattttggtttttaatatatagttttttgttgtttatttttgagttttgtgtaaatggaatttttaaatatttttttatatttggttttttttatttatatggttagtttgtaagatttttttatgttattgtgtgtggtagaagtttgtttgtttttattgttatggagaattttatggggaagagagggaatggaagtaagtgttttaaggttataggttacgttgtatttggaattattattaaagtgttttttgatagggtatttgttaagtagaggtttggatggcggtttttagatttttcgtaatgtttgggtttttggttgtttttttagagtttattgggtagtttgttgtaatagggtagggaggatacgaggatatggtagcgagaggtattttgatataggtaggtgtttttgcgtattgaggtttttagttttaaagtcgttcgaggttttgggaagttgttgttttgaatgtgtatattatatgtatgtaggtatatatgtacgtaggtgtatatattatttatgtatgtaaatatttgtgtgtatttatacgtagatatgtgtatatatgtatatgtatatatatgtgtggatatatggttatgtttttagtttttattagttgttgtcgtatatttatataattgtggaagggaagagggtttgtttagtataagagtattttgtattttagaattaaaggtttttttattgtggttttagattgttttttattacggtgtttttattaggattttaggtttttgttttgaataaacggtggtttagaaatggtttgataatattgttggatgattttttataagttaagttttttgttttgtttagattttttagagttagttttttttttttaaagggttttaatagtgttgattattagggttggtatgaggtgtaaattaggcgaagcgtgagaagtatttggtttatggtagggtatagtaaatgtttgggtttgtttttgattttttggatatttgtatggagtagtttttttttatgtttcgttggtttttgtttatttattttttttaggttttcgggttttttatgggttggtggtgttgtttataaatgatgttgggggttgtttaagtatatttatgtttgtgtttggttgtttttaggtttatgataattgcgttttttttttttgtttgtttagatttgttgagattttttttgggtgtttttttttttaggtaggttgttttgattgtagggtttggttttatgggttttttgtttatagtatatatagttttttggcgggtgtttttaaagtttttttgatggttttgattattgattttagggttattttgaattatgtacgtggtagttttttatgtttttatagttgtaggagtatcgagggtagggggtgatggtttacgagtttttgagttttttattttatatttattagtttttaagaaggttgtgtgagggtagagttcgtatttatttattgaataagtcgtaagttttgggatttatgttggtttttcgaggtaattatgttcggttaagttttaagtttggttgtaattttgaggagatttagggatttttggggaggtttttttttgttaggttattaggagaagtatttttttaaggtatagagaggatagaggatatttaggattattgggtcgaaaggggtttttagggtttttttttttaatagttttttttatgggataaggggagtttgaggttatagaggggagtagatagttagtagttgggaataaagggattttgggtaaagggatgaagatttggattggattagtggtttttagtggggtaaagtgggggttgtatatcgggtattttgggttgaatttataagttagttgtatgatttggggtaaattgttttatttgttatagatttggggtttttattaatgatattagtataaaataagtttttgttagttttggggttgttgtgatttagtgggatgatggatggggaggtggtttgggttttttagagtggttatagttgagatggttatgtgatttagtatttggtatattttatttttaacgagaagagttaagtgatgttaggaaagtttttagttgaaaaaaaaagtggagttaattagaatattttttttttttgatatttttgttagttaaattttttgttttcgttgtttattttattgggttatgaagattggggtttatagatattttagtaagtagagttatagtgggtatatagaagacggtttatagttgtttttggggatgtttatttgttttgattttatagaggggttagggtagagtaggtaatttatttagataatttttttttttttttatagtaggaaggattttaggttatttgtttgaggatagaaagaagtagggaggtttatggagtaggttattttttagttagttgtgaggttgtattgtaaatgtgattatttattttaaatagggattttggacggtaaataggggtattttgggtggagtgtgtttttttgtcgtagtatttgtatttcggttggagtgtgtttttttgtcgtagtatttgtatttcggttggagtgtgtttttttgtcgtagtatttgtatttcggttggagcgtgtttttttgtcgtagtatttgtatttcggttggagtgtgtttttttgtcgtagtatttgtatttcggttggagtgtgtttttttgtcgtagtatttgtatttcggttggagtgtgtttttttgttgtattatttgtatttcggttggagtgtgtttttttgttgtagtatttgtattttggttggagtgtgtttttttgttgtagtatttgtatttcggttggagtgtgtttttttgttgtagtatttgtattttggttggtgtatgtttttttgttatagtatttgtatttcggttggagtgtgtttttttgttgtagtatttgtattttggttggagtgtgtttttttgttgtagtatttgtattttggttggagtgtgtttttttgttgtagtatttgtattttggttggagtgtgtttttttgttgtagtatttgtattttggttggagcgtgtttttttgatgtagtatttggataaatgtttgtttttgaatttttatgtaaataatgatttagtgataattattatttagtgacgtttagatttattgatttatttaatagttattattattttttaagtaaattagataagtagtaaagtaattatgtttgagaggttagtgatttgtttaaggttatagagttatagaggtaggatttgaatttaggtttaaagaagttttgatgtttggattttttaatgattttgtgttttttttgtttatttttagagaggttagtagaggtttagggttaggcggacgtttcgttttataaatatttttcgattttttatttttagtggttttgaagagtgagtttttttagagttagttgttttttcgttttttttttttgtttgtaaggtagttttagtttggtatagttagttttatatttttgttttgtgtttggattagttttttttatagtacgtgtttgttatttgcgtagtggtaaagcgggagattcgggagtcggttttttttttttttttttattataatggagtttatttacgtgtgggttcgtgaacgttttttaaaatttttttttttaaattttatttttagtatagtttattatttgtttggattattttggggtttttagttaatagttgtttaatttatagtgtttattgtaaagatagatttttaatttggaaataagattatgtttttgttttttttttaaaattttttaaaaatttttattgttgttataaagaaggtttaggcggtgcgttttgtggaatttttttattttagttattaggtttttttttagttttttttttataatatttgtttagggatttgtacgtgtagttttttttgtttgtttagattttagtcgagttattattttttttgggatgttttttttgattttttggagttgggtagattttttttatgtttaggtttttttttttaaataagggtgggggtgagtttttatttattgtgtggttatttgtttgtttttgttttttttattatgtattaggagtttaaatttttttttttatttgattatttttaatattcgaatataggtggtatagttatgagtttagtgggaggtgttaagggttgatttatggtatagataggatgtgttgagaaagaatagatttatagttatttaaatatagtatttatttaatgttattatcgtatgcgttaggatttttttaaattttaaagtgttaagtaatttaatttttacgattgttttataaagaaggggttgttatgtttattttatagaagataaaataggatattaagtaatttgtttaaggtatagggatattaaaattatttgttatagggtttatgtttagggtgtagaggaggagaggtgttttagggggtagggagtatgacggtaggaaggtatagggagggttttttgtatgggaggggggttttaggtggagatatatatatatattttaggtggatatatatatatttaggtggatatatatatatatattttaggtggatatatatataaatattttaggtggatatatatatatatattttaggtggagatatatattttaggtggagatatatattttaggtggatgcgcgtgcgcgtatatatatatatatataagatgtagaggtatatagtttttgttattgtttttgttaagtttgttattttgtggtttttttggagtatatttatttagtttttttgagtttttttttttttatttgtataattagggtagtgtggtttgttttgtagggttgttgtgaagatatatatagaatgttaagaatagtgtttaaaatttagcgggtattttaaaatgaaattgttaatgaatgtggtttttttaagggttaggaggattgttttaaggggtagggtgagtttttagttaataatggagtgaagggtagtaagtttaggaaagatgattgggttatttagtaatatagttgttattagatatttatttatcggtttgtattcggcgtttttttagtttttgggtttttatttattgagtttattttttgttaattttcgttttaaaggaaatttaaagaaagatgtaggagtgaattttttgaaaggtttttattattta

SEQ ID NO: 451 - DNA, 7244 bp, Artificial Sequence
  chemically treated genomic DNA (Homo sapiens)
aatattttcggtttgcgaggtcgtgttgggtgtttttgttaggtgaagaaagagaagaaggttggtatatttttttaggaatttttattgaagaaaatatttggattttttatattttttgtgtaaaataaataaagattttattaagtgatgtatattgttttttaaggaagaaatttgtagagataaaaataaataagtaaataattgaaataaaaatatgataaatttttaaatttttttagtgttaatttatttgttattatggttttttataaaggtagagattattaattataggtttttttagaatttatattttacgttaagattatttaatttaaatagtgtacggaaagtttagggttttttttattttgttttttattttattttatatatacgtttttatttaaatgatatttttggaaagaaatttatatattttatttgtttatattttgttttttttttcgtttttcggtaattaaatgtgagttgttttttaattgtattggagaattagaatttattgtatatatgtttgtgttttatttaataaaaaaatttatattttaagataaattttgttagtaatttatgaggtaagtgattatttatgttaattaggtagaaatatatttttaagtataatgtattatataaatttgaatgtaaaatgtttaattatgaagtaaatataggtaatgtaaataataaattatttttaataaaaattataaaagatgtgttttgaaagagagagcggttttaatttataattgtgaattgtttaaagagaaaagaattaataaatgttgaattattttgatgattatttagtatataatttatttatttataacgatttttagtaattagattgttgttttatattttttaatatgaggtaagattgtttttttagtaattttgtttttattagattatttcgtttgattttattaatttttttttatgaatttgttaatagtgatttgtgatttatttattttgttaattgaagattgttaaaaggatttatttaatattggatttaagaatagtgtacgttttatcgtttagttattttgaagaatttttttttaaattaatttagttggttttatagtgaaatttagtggatattggttagttttgttttataaaattagtttttaaataaagagtttagatattatatttgatgtattttattttatttagattatggatgtttgattttaatatgatatatttgagttgttataatttataatcggggaaaatatatttttttaagtttttaatttttgtaatttggatatgaataggggttttgttttttatttttgtatgaagttattatgtatgtattgacgtgaaattataattgtgtttttgatgttattgtgttataatattttatgcgatgtaatttatgttttttttttttttataaattttttataaatatttattgtttttaaaaattttaatattattggttcgaattggttaataatgataaacgtatggtttttaaattattgtatattgttttatagagattattagagtatatatagtaaggggatgttaagtagtaagaaaatatagtttatattgtatttggattagattggtttggatagaagtgaaataaataatgttagtaaagaagtttaaagatatgtggtttattgtaattgtatagaattaaaaatttgaatagtatttattaaaatgagagagtttaattgttataaaagaaatgttgttaatagagaattgtaaatgtttagatatttttgtgaattattaaataataatgtaaaaaggataaaaatgagaattaagttataagtttgagagtattattgttatatatttaaaaaaataattttgatttttttttttttttttttaagagaaaatgggcgattataaagattttgtaataagagaaataaaaatattatgtttttatagtagtgtatataaataaattataaaaatgtgtagataataatatatttagttgtttaaatatgggtatttaatttttagaaatgatatataataatgtaataattagatatttagttatgaatgtgtatggtatagtttttattattagtaaattttgtgtataaaatattatttattatttattataatattgtttttagaggtaatgattatattttatagtttttaatataaatatgatgtaaaaggattaaaagtatattataaataaataataaattttttttaaatatatttaaatttatattttatatgaaaaatataaattttttatatttgtgattattgatttttaaaaagatttagaaaattattgttacgggtaatgttaaatgatataatgtttatgtaatggaaagtgtggatttttttttaaataaattataattttttaattttattattagggaaaatattgttaaagagaaggaaagtaagggaattttgttaggttgtataaatattgatataatttttatttttttttttttaaattggtaatagatatagtttattttatttaataaaatgtttttataagattaaaattatttttattaataatttttttgtagttacgatgaaaagaaatattatttgtttgaaaaatatcgatagcgttgttttttttagattagggtgtgtttacgaattttttgggaagttttttattaaggatttttgggtttgttgaaattgaagtttattaggattagagaaattaatataggtttaatatggtgtaaggaacgagtgagagatatttgaggttataaatagtaaagtatgttgcggggtggggaagattattttgaagtgtaatgtttaagacgttggtttaatatatgattaagtgttagaagttaggttttttgagaattattttttagataaataattttatagtattgtatttaattttatttattagagatattttatttattattgaattataagtaattttaattttattgatattgttataaagttcgttgaaaatttattttggtatttttaaagggtttggggttttgttatatggggatttttttgtaaaggttttagttagaaattatatttcgagggtgtttgtattttttggtttttttgttaataattaaggagaagaggaggggtaaaaatgatttttgtatttgttagtatttttttcggttttttttttatagggtcgggtttttttattttagttaaattaattttgtgtgttttttttttttttttatattgggtaattagttgttttttattttatcgataaaattggatacggattaattttaattgatttttgtcgaaaggtggcgttgttgaggtaaaaattaattcgttttaataatagtttttatttttcgatttttttgtaggttttttagaatttttttttttttttaatgtatttttttagcggtttttttttttttataaagtaaaataaatacgattaaaaatattaaatgtattttattaattgaaggaattaatagttttaatttttaagtagacgggttggttttttaaaggttgggtcggttttaggagttttttttttaaataaatttttgttttttcgatttgtttatcgttttaaaattttagaaatagagttagttgttggtttttttttttttttttttttttttttattttttttttgtataaatttttagagaattaatttagaaatttgaattatttattagtatttgtaattgggggtgggggggagtagttttttttattttattttttattttgcgttttcggattagttttagaaatcgcggtttaaaatttaatttttcgagggtagttggtgagggttggggtattgttttttttttttgttttttgttacgattaagttcgaaataattaaaggaaacgtaaaagtgtaaagggcgcgtttgattttgataaatagaggttagatttcgtaaggggacgggtgagtgtgagtgtgtgtgtgtttgtgtgtgtgtgtgtaagagagagagagagcgagcgcgtaatatgagttttaaaggttaaatttcggttagttaggagtcggaaggttgagttcggttgatttgattttgagttttttcggagttatttcgtataggcgttcgttttgtttaagggtacgcgacgttagcgggtagtcggttttcgtgaagaatggtttttaaataatttattttatttcgttgtaaagagagggataaaatgggttttttttttttacggatgtttagttttttgggtaggcgtatggtcgggcggcgtttagttcgtagtttcgattcggatattttattgtattttttttttttcggtttttttttcgtacgggcgttcgagagacggataaagagttggggttaagtttgagcgtcgggtacggttaggtttagggaaggaaggttttcggaagatatttgggtattagagttggtgcgaggaggaaaagttgggaggcgaatttataattttgggggtggagggtaggtaggggaggggaattaggttaattttagtcgagtgagtttttagcgagttggggtttcggatgggaggtttgtttcgcgttttaaagaaaagtaaatcgtttttttaggttcgttcggattgtcgaagtttttttggaaaaattttttttttttttatattaaattttgcgtcgggtttcgttttttttcgggtaggtagcggcgtaggaagggttaagttagttcgttttagttgatagttagttgattgggttttgattgatagtttcgaaaagtttttttgtttttatattattatgttaatcgcggtcgttttcgtcgttttttattggttcggagtgttagttaattttttatttggatttgacgttacgagtgttataaaatttagtaattgttttaaattttttttgttggattagaggttttaaaatttttttttattttttagttgtagttcgggttgtttgtcggtttggttttttttttttttttttgttttttgtttcgtttttttttaggatttcgttattttgtttttttaaaaaaaggtaagaaagaattaaattttttttttttttttttttagtcgggttgtatttttgttttgtattttgtatagaggtagagagcgcgcgagggagagagaggaaagaaaaaaaataataaagagagttaagtagaagaggaggcgagaagtatgaagtgttaattttttcgtgttaaggttcgcgtcgttcggatagacgttcgtcgcgtttttagtttcgagcggacgtcgcgcgcgttttgtttgtagttcgggtcggcgaggcgagtttttttttatgtaaagcgcgtagcggagcggcgagcgggggacgtcgcgtatcgggtcgggtttttttagtttcgtcgtcgtagttattatcgtcgttatcgtagttcgcggaggattttttcgagtttgaagtcgtcggttcggcgcgtaaggaggcgagcgagtaaggaggggtcggggcgagcgagggagtatattggcgtgagtaggggggagggagggcgggcgcggggggcgcgggtagggcgggggggtgtgtgtgtgagcgcgttcggaggtttcgggttagttatcgtcgcgtaagttagaagcgttttagttcggtaagttggtttattcgttggttatttagtatagttcgttggttttttttttgtagtttatttggcggagcggcggcggcggcggcggcggcggtaggagaatggtattagaattggtaatgagtaatttcgatttgtttattagtttttggttatggaatatgttaatgatttcgatttgatgaagtttgaagtgaaaaaggaatcggtggagatcgatcgtattattagttagtgcggtcgttttatcgtcgggggttcgttgttttttatttttatgagtacgtcgtgtagttcggtgttttttttttttagtttttcggcgtttagttcgggttcgggtagcgagtagaaggcgtatttggaagattattattggatgatcggttattcgtagtagttgaatttcgaggcgttgggttttagtttcgaggacgcggtcgaggcgtttattagtaatagttattagttttagggcggtttcgatggttacgcgcgcggggcgtagtagttggtcgcggcggtcggggtcggtgtcggcgtttttttgggcggtagcggcgaggagatgggtttcgtcgtcgtcgtggtgttcgtcgtgatcgtcgcggtcgtcgcgtaagcggcgcgggttcgtatagaataaataagatacgaatatatggatatttaggtgaagagaaaattagggttgattaaggaaataaaagtagttataggaatgttaaggttttaagtgtttataaggtaattgtgattatgtttgttatgtggtataaatttagtaaatatttagttttttttttattgtgaatataggtttttaaggtggtttttttatgttggaagagaatatgaggtaaatgatgttttttacgtaagatagttaggttcgtggaggttggttttttttattttgtgtaaagttgattcgtttggttttatttattgggcgattgaatagttattttaatttttttgtttagtaaatttgtgtttatttttaaatttatgttttagggttttgttttttttgaagtggtatttttcggttataaagtatgatagaggttttggtggttattaaaatgatttagtggtattttttttttaagaagaggagtgttattgatagttttagttattgttaagtttaaattaacgtaattgtattagtttttattttgggtttttttaattattgttttgttagtatttttgttttttttttgttttggagtgttttggggatttttattggttttgttagaaatgtttgatgtttttgaggtgggatttattatttgtggtaggtgtggatggtatttgattttttggagtaagatgtttagaaaagatttataagatggtcgtggatgataacgcgatttttaaaggttattttttttagatttgtatataggagttttcgtaggaaatgatattttttaaaaaatgttagtgatggagatattaaggtatagagatgataggttttattgtttaaggttatttaggtaatgggtgatagta

SEQ ID NO: 452 - DNA, 7244 bp, Artificial Sequence
  chemically treated genomic DNA (Homo sapiens)
tgttgttatttattatttgggtaattttaggtaatgaagtttgttatttttgtgttttggtgtttttattattgatattttttaaaaaatgttattttttgcgggagtttttgtgtgtaggtttgaggagagtggtttttgagagtcgcgttattatttacggttattttataggttttttttgggtattttgttttagaaggttaagtgttatttatatttgttataggtgatgagttttattttagggatattaggtatttttgataaggttaatagaagtttttagaatattttagggtaagaggggaataaggatgttagtaaagtaatggttgaaaggatttagagtgggaattgatataattacgttaatttgaatttggtaatggttgaagttgttaatgatatttttttttttggggaaaaggtgttattggattattttaatgattattagagtttttgttatgttttgtggtcgaaagatgttattttaagagaagtaggattttggagtatgggtttgaggatgggtatagatttgttgaatagagaaattgaagtggttgtttagtcgtttagtgggtagggttagacggattagttttgtatagaataaagaaggttagtttttacgagtttggttgttttgcgtaggaaatattatttgttttatatttttttttagtatgagaaaattattttgaaagtttgtgtttatagtaggagaggaattaagtatttattgagtttgtattatatgataagtatggttatagttgttttatgaatatttagagttttaatatttttatagttgtttttgtttttttaattaattttggttttttttttatttgaatatttatgtattcgtattttatttattttgtgcgggttcgcgtcgtttgcgcggcggtcgcggcgattacggcggatattacggcggcggcggggtttattttttcgtcgttgtcgtttaaggaggcgtcggtatcggtttcggtcgtcgcggttagttgttgcgtttcgcgcgcgtagttatcgaagtcgttttggagttggtggttgttgttgatgagcgtttcgatcgcgttttcggggttgaagtttagcgtttcggggtttagttgttgcgggtagtcggttatttagtagtagttttttaggtgcgttttttgttcgttgttcgagttcgggttgggcgtcgagaagttgggggaagggggtatcgagttgtacggcgtgtttatgggggtggaggatagcgagttttcggcgatgagacggtcgtattggttgatgatgcggtcggtttttatcggttttttttttattttaaattttattagatcgaagttattaatatattttatggttagggattggtgggtaggtcggagttgtttattgttagttttgatgttatttttttgtcgtcgtcgtcgtcgtcgtcgtcgtttcgttagatgggttgtaggagaggggttagcgggttgtgttgggtggttagcgggtgagttagtttgtcgggttggggcgtttttagtttgcgcggcggtggttggttcgaaattttcgagcgcgtttatatatatattttttcgttttgttcgcgtttttcgcgttcgtttttttttttttttgtttacgttaatgtgttttttcgttcgtttcggtttttttttgttcgttcgtttttttgcgcgtcgagtcggcggttttaggttcgggaagatttttcgcgagttgcggtggcggcggtggtggttgcggcggcgaagttggaggagttcggttcggtgcgcggcgtttttcgttcgtcgtttcgttgcgcgttttgtataaggaagggttcgtttcgtcggttcgggttgtaggtagggcgcgcgcggcgttcgttcggggttggaggcgcggcgggcgtttgttcgggcggcgcgggttttggtacgggggagttaatattttatgtttttcgtttttttttttgtttggttttttttattatttttttttttttttttttttttttcgcgcgttttttatttttgtgtaaagtgtaaggtagaggtgtagttcgattggaggagagggaggggggagtttagtttttttttgtttttttttaaaaaagtaaaatagcgaagttttggggaaagacgaggtagagagtaaaggggggagggggaggttaagtcgataagtagttcgagttatagttagaagatgaaaaaagattttaaagtttttgatttagtaagaagagtttaaagtaattgttgagttttatagtattcgtgacgttaggtttaaatgagaaattgattggtatttcgggttaatgggaggcggcgagagcggtcgcgattagtataatagtatagaaataaggaaatttttcggagttgttaattagggtttaattagttgattgttagttgggacgggttggtttaattttttttgcgtcgttgtttattcgggagggaacgaggttcggcgtaaagtttggtgtaagaggggaaggagtttttttagaggggtttcggtaattcgggcggatttgggagggcggtttgtttttttttggagcgcgagataggttttttattcggagttttagttcgttgggggtttattcggttgggattggtttgattttttttttttgtttgttttttatttttaggattgtgaattcgttttttagtttttttttttcgtattaattttggtatttaggtgtttttcggggattttttttttttgagtttggtcgtgttcggcgtttaaatttggttttaattttttgttcgtttttcgggcgttcgtgcgaggaagggatcgggaagggagggatgtagtggggtgttcggatcggggttgcgggttgggcgtcgttcggttatgcgtttgtttagaaggttgggtattcgtggagagggaaagtttattttatttttttttttataacgaggtaaaataagttgtttagaggttattttttacggagatcggttgttcgttggcgtcgcgtgtttttggatagagcgagcgtttatgcgagataatttcggggaagtttaaagttaggttagtcgggtttagtttttcggtttttgattggtcggagtttggtttttgagatttatattgcgcgttcgtttttttttttttttatatatatatatataaatatatatatatttatatttattcgtttttttacgaaatttgatttttgtttattagggttaggcgcgttttttgtatttttacgttttttttaattatttcggatttgatcgtggtagggagtaagggggaaaaataatattttagtttttattagttattttcgaagggttaaattttaaatcgcggtttttggaattagttcggaaacgtagagtggggggtggggtgggggaggttgtttttttttatttttagttgtaaatgttaataagtagtttaaatttttagattgattttttaaaagtttatgtaaaaaagaaataaaaaagaaaaagaaaaaagaaggaaattaataattaattttgtttttaagattttaaagcgataggtaagtcgaagaagtagagatttatttggagagaaagtttttgaaatcgatttagtttttggaagattagttcgtttgtttagaagttgggattgttgatttttttaattaatgaaatgtatttggtgtttttaatcgtatttattttattttatgagaagggggagatcgttaggagggtgtattaaaaaaaaaaaaaaattttgaaaagtttgtaaaaggatcgaagagtggaaattattgttggagcgagttggtttttattttaatagcgttatttttcggtaaaggttagttgaaattgattcgtgtttagttttgtcgatgaagtgaaaagtagttggttatttagtgtgggaggaggaaagagatatataaagttagtttgattgaagtgggagaattcgattttataggaaaggggtcgaagaaagtgttggtagatgtagagattatttttgtttttttttttttttttgattgttgataaagaggttaggggatatagatattttcggggtgtaatttttggttgagatttttgtaagaggatttttatgtaatagggttttaaattttttaaaagtgttaggatggatttttaacgggttttatggtaatattaataggattaaagttatttgtaatttagtgataaatgagatgtttttagtaagtaagattaagtgtagtgttataaagttgtttatttggaaagtaatttttagaaaatttgatttttgatatttagttatatattaagttagcgttttgaatattgtattttagaatggttttttttatttcgtagtatgttttgttatttataattttaggtgttttttattcgttttttgtattatattagatttgtgttaatttttttgattttagtagattttagttttagtaaatttaggaatttttaatggaagattttttaaaagattcgtaggtatattttaatttgaaaagggtagcgttgtcggtattttttagataagtagtgtttttttttatcgtgattgtagagaagttgttaataagggtagttttggttttataagagtattttgttgggtggaataaattatgtttattattagtttggggaagaaagagtgaagattatgttaatatttatgtaatttagtagaatttttttgttttttttttttttaataatattttttttagtaatgaagttaagggattatagtttatttagaggaaaatttatattttttattatataagtattatgttatttaatattgttcgtaataatagttttttaggtttttttaaaagttagtagttataaatgtaggaagtttatattttttatgtaaaatatgaatttaagtgtatttagaaagaatttattgtttgtttatgatatatttttaatttttttgtattatatttgtgttaaaagttgtaaggtatgattattgtttttgaaagtagtattataataaataataaataatattttatatataaagtttgttaatgatgaagattgtgttatatatatttatggttgagtatttaattgttatattgttatatattatttttagaaattaaatgtttatgtttgggtagttaaatatattattatttgtatatttttatggtttatttatgtatattgttgtgaagatatggtatttttattttttttattgtaaggtttttatagtcgtttatttttttttggaaaaaaaaaagagaggattagaattatttttttagatgtgtagtagtagtgtttttaggtttataatttaatttttatttttattttttttatattattatttagtgatttataggggtgtttaaatatttatagttttttgttagtagtattttttttataataattgagtttttttattttaatgagtattatttaggtttttgattttgtataattatagtgggttatatgtttttagatttttttgttaatattgtttgttttatttttatttaagttaatttaatttaaatataatgtgaattgtgtttttttattgtttaatatttttttgttatatatattttagtaatttttgtagaataatatatagtaatttagaaattatgcgtttgttattattgattaattcggattagtagtattaaagtttttgaaagtaatgaatatttataggagatttgtgagggggaggaggatatgggttatatcgtatagaatattgtgatatagtaatattagaaatataattatagttttacgttagtatatatataatgattttatgtaaaaatgaaaaataaaatttttgtttatgtttaaattataaagattaaaagtttaaaggaatatatttttttcgattgtgagttatagtaatttaaatatattatgttggaattagatatttataatttgaatagaatgggatgtattaggtatggtgtttggattttttgtttaggggttgattttatggggtagaattaattagtgtttattaaattttattatgaaattaattaaattgatttgagaaagagttttttagagtaattgaacgataaggcgtatattgtttttaggtttagtgttagataaatttttttaatagtttttagttagtagggtaagtaaattataaattattgttagtagatttatggaagaaaattaatagaattagacgagataatttgataagggtaaaattgttgaggaaatagttttgttttatgttggaggatgtgaaataatagtttgattattaggagtcgttatgaataggtgaattatgtgttaaataattattagagtaatttagtatttattaatttttttttttttaagtaatttatagttgtaagttaaagtcgtttttttttttaaggtatattttttataatttttattagaggtaatttattatttgtattatttgtatttattttataattgaatattttatatttaaatttatgtaatgtattatgtttgagaatatatttttgtttgattagtataaatagttatttattttatgaattattaataaagtttattttaaaatataggtttttttattaagtggaatataaatatatgtataataaattttgattttttagtgtagttagagaataatttatatttggttatcgggaggcgagggaggaagtaaaatatagataaatgagatgtgtaggtttttttttaagggtattatttagatgggggcgtgtgtgtagggtggggtagggggtaaagtgaagaaggttttaggtttttcgtatattgtttggattggatgattttgacgtgaaatgtgaattttggaaaaatttgtaattagtgatttttgtttttgtagagaattatgataataagtaaattagtattggaagaatttgggggtttattatatttttgttttaattatttgtttatttgtttttgtttttgtaggttttttttttggaaaataatatatattatttaatgaaatttttgtttgttttgtataagagatgtaaaaaatttagatgttttttttagtgagaatttttgggaaggtgtattagtttttttttttttttttatttgataaagatatttaatacggtttcgtagatcggaggtgtt

SEQ ID NO: 453 - DNA, 6277 bp, Artificial Sequence
  chemically treated genomic DNA (Homo sapiens)
tatagtttgaaatttatttggggttttattttttggtgtgttgagaagatatgacgagttggtttatatgtttttaacgtttttataatattgatttagttgtatttttgtttaaagtagtattttagtttttttgatagtagagatttaagataatgaggtgaaaaaaaatcgtaagatatttaaattattattaataaaaattattttatggaattttatattataagaaaattagtttagatttttttaatgtaagaagttttatttttttttttttttttttttttttttttttttttttttgagacggagttttattttgttgtttaggttggagtgtagtagcgtgatttcggttcggtttattgtaattttcgttttttaggtttaagcgatttttttgttttagttttttgagtatttgggattataggtgtgtgttattacgtttagttaatttttgtatttttagtagagacgggggttttattatgttggttaggttgttttcgaattggtgatttcgtgattcgtttgtgttggttttttaaagagttgggattataggtgtgagttattgtattcggtttggaagttttattttttatatgtaatggggtttagtatgttttatttatatttgaataattttaggagtggggattataattgtttatttttttgtattgataggtatttttttgtttaattttttttgagttagaatttgattataaattattattagttttcgttttttttttataattataaagaggaagttagtttattcgttaaataagtattagttattatatttttgaatttttgttttttttattgtgtatattttttcgtttttttgtttttgtttttttaggaagaagtattagtatttttttttatttaagtttattttaaagttaattttatagtttttgtttttgatatttgttttttttttttttttttttaggaattttgttttattttttggttttttttagttttagtttataaatatatttattttattttttatttaatattgtttatttattttaaaagatagttttattttttatttttttgttattattaaatttatggaaagaattgtgtatggttattatttttagtttttttttattttttatggtaatttatttgttttttttttttttagcgtttataggaatttatttttgaaggatagtaatgtttttgaaatgattttattagttagtaggtttttttattttttgtagtatataatattgagtgttgtttttttttttgttttggtattttcgtttagatttttagatgtagaggttttttggttatttttttatttttttaattgattttttgtattatttttttttttattcgtttggtttttataaaaataaaataaaatagttttttttaaggtagtatttttagattatttttttttttagcgtgttttttttttttaggtaaatttatttgattttacggttttatttatttatgtttaatagagataatttcgagagtttttatttttagtttaattttgatttatttttataattttattttaaggtttttgttgaatatttttatttgaatattttgatgttattttaaatttatgatattataaatttaatttttttttaaagttatttattttttggaatttttaattttgttgaggatattattttaattttaattagttaagttttagatttataagttgtttttaagtttttttgttttttttataatttttatttattttttttttgtttgtttttttttatttttattgttttttttttttttttttttttttttttttttgagatagagttattttgttatttagggtggagtgtagtggtacgattttgacgtattgtaatatttgttttttggtttaagtggttttcgtgttttagttttttgagtagttgggattatagttgggattatatggtgtatattattatgtttggttaagtttagtattattattatttttttttgagatggtgttttattttgttgtttaggttggagtgtggtggtgcggtttcggtttattgtaatttttattttttaggtttaagcgatttttttttttagtttttcgagtagttgggattataggtatttgttattacgtttagttaattttttttatttttattagagatagggtattattatgttggttagtttggttttaaatttttgattttatgattttagtagagatagggttttattatgttggttaggttggattttgaatttttgattttaagtgatttgttcgttttagttttttaaatgttgggattataggtatgagttattatgttagtcgtttttttttaatttaggtttttttaattttttgttgaattgttttgatagtataatcggtatgtttattttttatttttaatttattatatttgttgttgttagattgtggtggagttgaattttatgtgaagtataagtattgaagtatttaagttattgtttatgaagaaaattttatataattaatattatttttgaaaatgttttatattgtttataaagtagaatttatagatattgttttttagtaagtttaatattgttagttttttttttatttttggaatagattattttttttttggttgaatattagatgaagttatttgtttggttttaggggtagagtcgtatgaaaaatatgtatttttaaatattagaattatatttaatattagtttatttgagtttatattagttatttatgagtgtgatttaaatttattggaatatttaaaagtatagttttgatttttattatttttatgttaaaaaatttttagtggttttttattgtttattgagaaggtttatttttttaatatggtatttaaaattgtttattgtttgatattaattttttttttttatttagtttatgttttagaatggaatgtttgtgatttttatgttcgttttgtatattttagtttttatttatatttttttttatagtggtttggaacgttttttttttattttttatttttgttgggtttagttattttttataggttaatttatatgttgttttttttaagatttttttatagaattttttttttagattttgtttagttaaaatcgtattttttttttttgaattgtagtcgttttttatttgtattgtgtttatggtaagtattattttttatttagaattgttatttttgtttatgttttataagtttataaatatttttagggtaggggtagtgtttgaattttttttatagttatgtatatattattatttttagttttaaatatgtagtttttaatagattttaatgaaaagataaattaaataatgtagttttttattttttttttatgtagaatgtgttttagtttggtagtgtttaaggatttgggatttagtgttttagaaagagtagtaaattttttttaattttagtagtatttttattaggtaatgaatgaatttaataagaagggggatgggtaaaacgttatatgtaaatagttgtattttgtttttttttaaagagtaaaataaatatgattttttaaaaagattatggaagttgataatataatggtttttttatagaaggttttaggatatgttaagttttgttattggggatggagatattttgtttttattgtgtagaaagagattgatgaggttttttaagtaatttcgtagatttattgttttgaagtattagaatatttttttgtgtattttaaatttattggaattttaagtttgtggagagaaaaattttagtttttttttttttttattttattttttttttaatagatataggatgttttatttcgggaatttaaagttgaaggggagtttagattttaggggtgtattgggtataatagttttttgaattttttttgaattatattttatattttataaatataattttattttcgtttaattaaggaaggtttgggggttggggagtttatttgatattttttaagggatgggggttgaggagtttatttgatattttttaagggatgggggttggggagtttatcgatattttttaagggatggggtttttatttttattatggatatgtagaaaatgtattttgttttagtgatagatagagggagtttgatattgaatttatattcgtagcgttgattttagattgattagggaaaatgattgttttgtatttttgtaaaattttaatgtttcgtgagaagtgtatcgtgttgtttgatgtatagtgtttaggtttgttttgattttattaaattatggaaagcggtttttatgagggaagtttttttttttttttttttttttttttttttttaattttttgtacgattatttaggtggttttttttgtttttatttttttttttggattcgggtttttaattattattgtagagaattggaaggatgtttgttttgtttttttagtacggttttttttgttcggtttttaggttattcgtttttatttttttttttttttagtttcgtttttttcgcgtatttcgtggttagtagttagatagttgtgtttaattagaaattatttataattttagacgattcgaaggggaaatttcggcgtgaagtgtagtttcgtttcggttttttttagttttttttttttttttggaattcgaggcgcggatttttttcgttttatcgttttagttttttcgggagttcgtcggtgttttttagggtgtcggttcgtgttgggaagtgttttttattttggtaatggggggcggcgaggtatcgtaggagtggcgaggcggcgtttagggtggtattgttcggaacgggggttggtgcgcgcgggagggttttcgcgcgggttcgtcgttgtcgtagttgcgagcgcgtcgcgttatcgagttttttgtagtaatggttcgttcgtgaaacgcgagttacggttgttttttttaagagtgtttgtatttttcgtttgcgtttcgtaattgttttgggtgaaaatggttgtttagattaaaatgtggtagaagggattaagtagtggatattgagtttgtgaagtttaatttttaagtttcgagatttgggggattgagagtttagttttgaaaagtgtattatgaatttcggagttgttatgaaatatggaaacgatttttcggtcgagttgagtgaggtaagaaatagttgaggtcgggagttagggtttttcgggcgtttgtttttttataaattttttttttttcgatttttttatagttttatattttatttttttgtgtttttagtttggaggtagcgtaattgaagattagtagattttttggattttgttttaatttgtagtgttatttaggaaatgatttgaattggtttgatattttagtttgaaatgagtggtttaaaaaagaaataattttttattaagtcgcgaggcgttttatttacgatagtttgtattttttgtttttttttattcgtttttattaatttatatatatttttttatttttttgatcggtaaaatatacggatattttcgatgagtttaagtcgacggtaattaatttggtgggggtggtggtggtgagggggacgtattggattattttattttttatttggtttttacgtgcgatgcgtttggttacgtttaggtaaggtggttttttttttaggttgagatgaatgattcgcgttggggaggggtttggggagaaagtattttaaagtcgttttagaattttattttttgttcggatttggatttttgagtttttgaggtaagcgtatttgtaatttttgggtttttattgtaatttatttatttgagtgtttgagattagttttgaaattaaagttatattaaatattatgtaaatgtgtgagcggtaagatgtttaaagttatttttttttatgattttagggatgtttcggtatattttttaaagttttgaatatttgaaaagtgatgagaagttcgtagaattgggtgttgaaaagaagaggaagtttgtgtgtttagtgtttatagttagaggtttggtgtttgtgggttttttttttggttttattattgagttatttatgggggtaaaagtagtataagtagttcgtgttttttgagtatggttgaagagaggaaagaggaagaaaaggaaaatagtgtaaaag

SEQ ID NO: 454 - DNA, 6277 bp, Artificial Sequence
  chemically treated genomic DNA (Homo sapiens)
tttttatattgtttttttttttttttttttttttttttttagttatatttaagaaatacggattatttatgttatttttgtttttataaatggtttagtgatggaattaagagggaaatttatagatattaagtttttagttgtagatattaagtatatagatttttttttttttttagtatttagttttacgggttttttattattttttaggtatttaaagttttgagggatgtgtcgaagtatttttaaaattatgaaaaaagatggttttgggtattttatcgtttatatatttgtatagtgtttgatgtagttttaattttaaagttggttttaaatatttaagtggataggttatagtgggagtttaggaattgtaaatgcgtttgttttaaagatttaggagtttagattcgggtaggaaataaagttttaaagcggttttgaagtgttttttttttagatttttttttagcgcgggttatttattttagtttagggaagagattattttgtttgaacgtagttaaacgtatcgtacgtgggagttaagtgggagatgaaataatttaatgcgttttttttattattattatttttattaaattagttatcgtcggtttaaatttatcgggaatgttcgtgtattttatcgattagggaaataaaagggtgtatataaattagtggaagcgggtgggaaggaataagggatgtagattgtcgtgagtaaaacgtttcgcggtttggtgagaggttgttttttttttaagttatttattttagattgaaatattaagttagtttaggttattttttgagtagtattataagttaaaataagatttagaaaatttattaatttttaattgcgttgtttttagattgggagtatagggggatagggtgtagggttgtggggaggtcgaggggagggggatttgtggaaaagtaaacgttcgagaaattttagttttcgattttagttgttttttattttatttagttcggtcgaggagtcgtttttatattttatggtaatttcggaatttatgatgtattttttagagttgggtttttagttttttaggtttcggagtttaagagttggattttataggtttaatatttattgtttggttttttttgttatattttagtttagatagttatttttatttaggatagttgcgaagcgtaaacggaggatgtaggtatttttaaaaagagtagtcgtggttcgcgttttacggacgagttattgttgtaggaggttcggtggcgcggcgcgttcgtagttgcggtagcggcggattcgcgcggggattttttcgcgcgtattagttttcgtttcgggtagtgttattttgggcgtcgtttcgttatttttacggtgtttcgtcgttttttattattaggatggagggtattttttagtacgagtcgatattttagagggtatcggcgagttttcgaaaaaattagggcggtggggcgaggaagattcgcgtttcggattttagagaaggaaagaaagttagagggagtcggagcggagttgtattttacgtcgaagtttttttttcgaatcgtttggagttgtaagtggtttttgattgaatatagttgtttagttgttggttacggggtgcgcggaggaggcggggttagagggagaaaagggtgggggcgagtagtttggaggtcgagtagaggagatcgtgttgggagagtagagtaggtatttttttagttttttgtaatagtaattaaggattcgagtttaggagggggagtagaaataggaaaagttatttgaataatcgtgtaggaaattaaaaaaaaaaaaagaaaagaaaaagaaaaaaaattttttttataggagtcgttttttatgatttaataaggttaagataaatttaaatattgtatattagatagtacggtgtattttttacggaatattaagattttataagggtgtagggtagttattttttttaattagtttaaagttaacgttacgggtgtaaatttaatgttaaattttttttgtttgttattggggtagagtatattttttgtatgtttataatgaagatagaggttttattttttgaaagatgtcgataggttttttaatttttattttttgaaagatgttagataggttttttaatttttattttttgaaagatgttagataggttttttaatttttagattttttttaattgagcggaggtagagttgtatttatggagtgtggagtatgatttagaaaagatttaaggggttgttatatttagtatatttttgggatttgagtttttttttaattttgagttttcgaggtaaaatattttgtgtttattgggagagagatgagatgggggaagaggggaattaggatttttttttttataaatttaaagttttaatgaatttgagatgtatagaaaaatgttttgatgttttaaaatagtaggtttgcgagattgtttaagagattttattagtttttttttatataatggggataaaatgtttttatttttaataatagaatttggtatattttgaagttttttgtgaaaaagttattgtattgttaatttttatggtttttttaaaaaattatgtttattttgttttttaagaaggggtagagtgtaattatttgtatataacgttttatttatttttttttttgttgagtttatttattgtttgatggaggtgttgttgggattaggaagagtttgttgttttttttagagtattgggttttaagtttttgggtattgttaaattagagtatattttgtatggggaggagatgggaagttatattatttaatttatttttttattgaaatttgttgaaaattgtatgtttgaagttggaaatggtggtatatatataattatgaagaagatttaagtattgtttttgttttgaaggtgtttatagatttgtaaaatatgaatagaaatgataattttagatagaaaatgatatttgttataaatatagtataaatgaggagcgattgtagtttagaggagggaaatacgattttggttggatagggtttggagagaagattttgtgaaggaattttagaagaggtagtatgtgagttgatttgtgaagaatggttgagtttagtagagatgggaagtaaggggaaagcgttttaggttattgtgagagaaagtatggatggagattggaatgtgtagagcgggtatggggattataggtattttattttggagtataagttgggtgagaaaggggggttggtgttagatagtgaatagttttaagtgttatgttaaaaaaatgggtttttttaataggtaatggagagttattaaaggttttttagtatagaaataatggagattagagttgtgtttttagatattttagtagatttaaattatatttatgagtaattaatatgaatttaaataggttagtgttgaatgtgattttggtgtttaaagatatatattttttatacgattttatttttaaaattaagtagatgattttatttggtgtttaattaaaagaaaagtaatttgttttaaaagtagaggaaaaattagtagtgttgaatttattgagaagtagtgtttgtagattttattttatagataatataaggtatttttaagggtaatgttgattgtatgagattttttttataaataatgatttgaatattttaatatttatattttatataagatttaattttattataatttggtagtagtagatgtagtaggttgaaagtgggaaatgaatatgtcgattgtattattaagatagtttagtaagaggttaaaagggtttgaattaagaagggacggttggtatggtggtttatgtttgtaattttagtatttgggaggttgaggcgggtagattatttgaggttaggaatttaaggtttagtttagttaatatggtaaaattttgtttttattaggattatgaggttaagagtttgagattaggttggttaatatggtgatattttgtttttaataaaaatagaaaaaattagttgggcgtggtggtaggtgtttgtaattttagttattcgggaggttgagaaggagaatcgtttgaatttgggagatggaggttgtagtaagtcgagatcgtattattatattttagtttgggtaatagagtgagatattattttaaaaaaaaataataataatattaaatttagttaggtatggtggtgtgtattatgtagttttagttgtagttttagttatttaggaggttgaggtacgagaattatttgaattaggaggtagatgttgtagtgcgttaagatcgtgttattgtattttattttgggtgatagagtgattttgttttaaaaaaaaaaaaaaaaaaaaaaaaagaagggataatggaaataggaggggataggtagaaagaaagtagatggaaattgtggagaaaataggagagtttaaaaataatttgtagatttagaatttggttgattggggttaaggtaatgtttttaataaaattaggaattttagagaataaatagttttgggaggaaattaggtttgtggtattatgagtttgaggtggtattaggatatttaaatggagatgtttagtaggagttttgaaatggaattatggagataagttagggttgagttggagatggaggttttcgaggttatttttgttagatataaataaataaaatcgtgaaattaggtaaatttgtttaggaagagaggatacgttgaaaagaaaagtggtttaaggatattattttaaggaaggttgttttgttttgtttttatggaggttaaacgaataaaagaggaaatgatatagaaggttaattagggaaatgggaagataattaggagatttttgtatttgggagtttaagcgaagatgttaaggtagaaggaggagtagtatttaatattatatgttatagagggtagagaagtttattgattgataaggttattttaaagatattattgttttttaaagatagatttttataaacgttgaggagaaagaaggtagataaattattatagggagtgaggagaaattgggggtagtgattatgtataattttttttataaatttgatggtgataggaaaatgggagatgagattattttttggagtagataagtaatgttgaatagagagtagaatgggtgtatttgtaagttggagttaagggaaattaggagatggagtaaagtttttaaaaagggagaaaaggggagtaggtgttaaggataaaaattatgagattagttttggagtaggtttggataggaggggatgttgatatttttttttaggagaatagaaataagagaacgagagagtgtatatagtagggaagataagaatttagagatataataattaatatttatttgacgagtaaattaattttttttttgtaattgtgaaggggaaacgaagattaatgataatttgtaattagattttgatttaaggaaagttagatagagaaatgtttgttaatgtaagggaataagtagttgtgatttttatttttgaaattgtttaagtataggtgggatatgttgaattttattgtatgtaaagagtagggtttttaggtcggatgtagtggtttatatttgtaattttagttttttgggaggttaatataggcggattacgaggttattagttcgagagtagtttgattaatatggtgaaattttcgtttttattaaaaatataaaaattagttgggcgtggtggtatatatttataattttagatatttaggaggttgaggtaggagaatcgtttgaatttgggaggcggaggttgtagtgaatcgagtcgagattacgttattgtattttagtttgggtaatagagtgagatttcgttttaaaaaaaaaaaaaaaaaaaaaaaaaaaaaaaaaaaagagtagggttttttgtattgagggagtttagattggtttttttataatgtaaaattttatgaaatgatttttgttggtggtaatttaaatgttttacgatttttttttattttattgttttggatttttgttattaagaaagttaagatattgttttgaataagaatgtaattgggttaatattataagaacgttagaaatatatggattaattcgttatgtttttttaatatattaaagaataaagttttaagtaggttttaggttata

SEQ ID NO: 455 - DNA, 9502 bp, Artificial Sequence
  chemically treated genomic DNA (Homo sapiens)
aataggaagtgatgagttttgaatatttattgttttttaaaataaaatatatttaattgtaagtttatataatttattttttaataatggttgtgtttaataattaatttataaaatttagttttcgtgtatttttgatttagtttgatttcgttagtaggttttgattttatattttttattatttgttgaataattttattcggatgttttttataagaaattataaatttaatatatcgaaatttaaatatgtttttttttttgaattttttagtgtatattttttttcgttttttgatttttttatttttattaatggtgtttttaatatttttagtaatttaattagttgttaagttttgaaggttttgtttatgtttttttgatttgtttttttttttttattttatttacggttattgttttattttagataattatttagttttttttttttgtttttttttattttaatttatttgataatattgatagattaattttttatatatatagttttgataatatagttttgttatttaacgtatatatatgaattcggtttttaaagttttttttgttttaggtaatttggttagtttttttttttttgtgttgggaatatgttttgtggattttgattgtgtgattttgtttttatttttgattttttttggattgtttttttttttttatggaaagatttataatttttatataagatagtttaaataataataaaaatatgtgggttggttgttataggaatatgtaagttgatgagaatttggagagcggaaataaataagaagtgttaaatttaggaattattttaaaataaaaatttatttggttattatttgttatggaggttttatgaaatatattatattgttatggaggttttatgaaatatgttatattgaggtagtatttagtttattgttattattaaaagattttttgggggagttaatatgagatttattttaaaattatggattttaattatatatgttatagtttttttttattaattgaaataattaagaattgtttgtattttaattatttattgtaattattttttttttaatgttttgagttaaattgggttgagtgggtgaggaaaggtgggtggtagagatatggagtttttaatttggtttgtttttattattgatgagtttgatttatttttgggatgtggattacgaggattaaagatttattacgtgtttaggattttttagtaattagaagtaaagaaattagaatttgtattttttatatatattttgttttttagtttttttttagtgtttagagtaaaataaaattttttaagtgtttgttttttttagtaggagaattttaatgatgagtagtatgtgattaagcgatttttttttttttaagttgaggttgaagtttagtagcgaaggaagaaggaataggtagttatagttttttggttagtagtattaatttttttacggagttaaattagtttgggttatggagagtttgaatttttagtttaggagaggtgaaagtgaatgagggagaggaaggcggtgagagataaatggtaaaggtaaaagtgggttgggtgtagtggtttataattgtaattttagtattttgggaggttgaggtaggaggattaagcgtttgagtttaggagtttgagattagtttgggtaatatggtgagatttttttttaataaaatatttaaaaattaattgggtatggaggtgtatgtttgtagttttagttatttgggaggttgagatggaaaaattatttaagtttgggaggtggagattataatgaattgtgatggtgttattggattttagtttgagtaatagagggagattttgttttaaaaatatatatatttttttatttttaaaaaaggtaaaagtgtattaaagtagtttgtttttattttgatattgagattattaattagtgttttgtagattttttatgaaaattattgttaaagatgtagattgttaggttttattttaaatttattgaattatggtttttagggggatagtttgggattgtgtattttttatgggtatatttagtaattttgatatattcgaaagtaagtttgtttaatttgtgattcgtaggttgtatatagttaaggatagttttgaatgtagtttaacgtaaatttgtgaatttttttaaaatattatgagtttttttgtggtatttttttaagtttattagttatcgttagtgttagtatattttatgtgtggttttttttttaatgtggtttagggaagttaaaagattggatatttgggttttaaagattgaggattattgttttagtgttggttaattattttagtgttggtttgtagatttaatatagtttttgagttaaaaacggtttttatatttttaaagggttgtaaaaaaagataaaaagaaagatagataaggaaagatatagaagaatatataatatagtttataaagtatttattatttggttttttataaaagagttttttgatttttttttagtgtattgtaaatgaaaggttgtatttaaatttagttttagtgtagttttgttatagttgaaataattgatgtagtaagtagattttaaaaaaaaaagtgatgaaatgtgtaaagttgttatttaaaaatatttttgtaataattataaatggagagagaaaatgtataaatataaatattttgtaatgagtttaaaaatatagttttatttatataagaattttgataattttatttgattttgtttttttataagtttattagatagtaatatatttaatattagtttaataaaattattgtatgtgaattttttattggattatgtatatttttaaatatattattgttatataattgagggaaaaatgtaaaattatatttgggaaatgaaaaattataaatttttaaaatgatatataggaaaatgatttataaagaaaaaaaggaaaattgaatttagtatttttttattttaaaggggtttaagaatttaggagtagttatatattttttaaaattttgaaaaagaggttatgaatttattttataaagggtttagatatttatattgtgtttaagagatttagtaattgggaattttgttagttagatttataaagtaattcgaaagttagaatgtaatttttttaggggtggtttttagatgtttattttagatatttttaaaagattttgtttatttttgatgtgaagaaagaaaattattatagaatttagaaataaatattggttttaaaagtattaatttgttttgttttttgtaattgtgattcgaaatattttataataattttgttttagtgttattttttttttaggaggaaaggaatgttaaaattttattagtaattaatatttgataaagatttaaattatataataattttaaagaaagtttaaaatattagatagttttgaaatttcgtatgttttatcgtttaataaaattatgatttattttagtaagaatatgtttttttagtaagaaaaaatgttttttgagttaagtttgaattgttggggtatatgggatatttataaatttagttagtagaagttttaaatttttaaaagattaaaggaaaaatatattagtgtgtatagagaatgaaaaaaaaatttttaatggttttaatttataaacggaagtaaaattaaaatttttttaaaatttttttagttattaatttttataaatttagtatttattttttttttttatttttggagatttttattaaataatacgaaagtttttgttgatttttatttcgtaaaatagagtttttaaatgatattaagtagggatatcgatttttaaaattataaattgttttatttttaaaattatgtatgtaaacgtggggttttttgagttttgttaggggcgggttgtttggattttcgtgtattttttttttttttttttttttttttttttttttgtaggtgtgtaatttagggtgcgcgttttgtgtagggaggggagtaaaggtgtgcggtgggtatcgtttgggtcgggcggggcggggtgggtggggttcgggtgtgtgttggggtgagagtgaaggatatgtgataatacgacggtggcggttgtaggattcgggaggggagtgaaagtttcgttggggcgttttattagtgagcggtgatggttgtcgtttatttgtattgaagcgttttttgttattaataagttaaattagagatgttatttatttaagaagaaggaaaaaaaattttagttaaatagtttatgaatatatatgtttatattttttatttttttaatttttaattttttcgtttttagagggtatagttgtaaattttgacgaaaatttaattttttgtgcgggaatttttttttatcgtttgtcgttttcgcgatagtgagtgggagttggaggagttttggtttcgttgttcgggagtacgcggagtcgggcgatcgcggtgcggtagttagggaggaggggaggcggcgggattgggcgcgggtcggcgtcgtcgcgattcgggagcggggtttgtttaggaaaaggcgtcgtcgcggttttcggttatttttttttggtttcgggttttttgttcgcgcgtttttcgggtttcgcggcgcgttaggcgtatcgcggcggcgcgagcgtcgaatgggagcggcgattcggttagttcggtagtttcgcgggcggtagttagggcgatcgcggaggcggcgggtagggcgcgtgcgtattgtaggggcgttagatttggcgggagggggagtgtttaaagttttttgtttgatggtatttttgtttatagagtttatattttaatattaatttgttttttttttttttttttttttttttttcgtgatttttttttttttttttttttgagaaatttcgttttagcggtgcggagcgtcgttgcgtagtcggggagggacgtaggtaggcggcgggtagcgggaggcggtagttcggtgcggttttcgcggttttcggcggagtttcgcgttcgtcgcgttatggttcgaagatttcggtataggtaacggggagtcgggcgggcggtcgagggcgggggcgcgcgggggcgcgcggggcgttaggttttcgggagtaggtgggaattcgtttcgggattatttgaggggttgttagatttttcgaggatttggagtttttgtttcggtagtagaagtcgttttagagattgatgaatggaagagtttttgcgggaaatgtattcggacgttgggaagtacgttttgcggtttattttgtaagttgtatggggatatatttttttttagggggaaaaagaaagtacgttttagtcgagggtagagcggtgtttattagtttcggggagtttattaggtgtttggtttgatgtcgcgggtgtcggcgagggattcgtagcgtaattgttggatgtattgagatatgtttggatttggaagtgtagagtatatggtagatatagggaaaatgttggattgtttagtagttgtaggtagtttatttaaattttatttattttttatggaggcgaggattagtgttagttgataggcggttgaaaagtagattttagggggataaaggggtttttatttttgtaaattgttttaagatttggttttggaggttcgaattatttttttttgaaaggtttttatttttattgtaaatattgtacgcgtatttatacgcgtcgtcgtcgtatatgttattgtatttagggaggttcgtcgggaagatgggtgtagtttttttatatttttggtcggatagatgggaagagggagaggaggaggaggagggaaattttcgttcgaattgttagttgttcgttttttagtttttatcggtttttggatttttttagtagtatacgtcggggttttttgcgagcggcgggtgttagggttagttcggtagtcgtcgtagtcgttattcggtttaaggggatagaggtcggtagtatttaaggtcgttgtcgcgtaatcgggacgcgattttcgcgggttttgtttttaggcgaaaggtttttgcgcggcgcgtatacgtggatgcggttgaggtcgtcgcgttttttcgtatttttttttagtcgttttaggtcgtttcggtcgaggcgcggtgatcggatagattttcgcgaaggagttttaaggcgaagtttatggaggtaaagtaaatttattcgtttttttttagattgtttgatttttttttattggtttgttgttgagtttgcgggcgttggttttcgcgcggcgttgggaagttgtaaagagcgtgggtggagattttgtagtagtattcgcgggttgggttgggcggggagtagcgtcggggtttggttgggttttggggacgagagggcgatttgggggagtttcgggttttttatgtttatttcggagtttggtcgcgtaggacggtgtgttgtttttcgagggttttatttttcgtttttaggattttataggatagttatcggggttatttgttttttttttttttttttttttcgagagttgaaattggtagtaggaggagggagtcgggtaggggtgttgggaggaggcgcggtagcggtttcgcgtttcgaggtttcggtcgttttcgcggggcggggtcgcgtaggttttttgaggttttaggtagtttagaggggaggcggttgggaggggcgggagttttgaatttgttttaggggaagagaaattcgattgcgggttcggagtcgttttttgtaagggcgagcgttaattcggtagggattatattaattaggttagcgaaatgagtttgaattttttcgaattatagtagcggttataaggtattttttttcgtttttttttttttttttaatttttagtattttttttttttttcgtttttttgtacggtttgtttttttgatagaatgtaatatttatagttgtatttttgtaattatatcgggtttagtaggtggggagtcgagtgtattaattttgaaattagtttttgaaaattttttgattgttgggtttgagattttgttagagtagataaaggaaaagttattttaggttttttagtagaaattaattatgtttttaggacgatttagagtaagtaaatcgtatgtaaagtttaaaggcgagtttgggtggttagtttggtagggaaatttaggagttgggcgcgtgagtagtttcggattcgttttgttgcgttttggtttttttaggttttgtagaagttattttttattttgtttttaagattttagttttgtatatttttgtttttgtgtttagtttttaagaggtacggaaggatatggtatggttatgtattagcgttggaaagtattttagaaataggatttaagtaagtttttattgtaaaggcgaggaattgaagttttgagagagaggaagtgatttgtttaagttatatagttaggtggaggttagattagaatttttgtttttagaattttagttttgttgattttcgtgtttttatttgacgttggttgttttttgcgggcggttgaataggttgtttgtttttgggttgttaaatcgttgcggagagagaggtgtttaatgattattttgaaaaatgtgtttagttttgaaaatgtgatttttagatttagttaaatttgaaaagttaattcgatttgaatttatgattgtagttttagatttttttggtttttttggtgttttttatattttataagggattgtatttggggtttttttaaggagttttttatgaattttttaaaagatgtagatttatatttttgggttttatagttttttttttttttttttttttttgttttattatatcgtgttttatatttttgtagtttttgtttagaagttgtttagtgttttttgttgatagtggaaatagaattaggttattgttttaaaatatagatattaaatgaaaggaattattatagattataaatatatattttttgggattttatttggtggtggtggtattttaaatttggattatattatgtcgttatttaatttggattattagattgttgtttaaaataatagttttaaattatgagaatttttaatttaggatttttggtaagtattttagttttatttgtagggggttggtaatatgtatattagtgagttagtttgggaagataaaatttgtaatgaatataatttttttttttaaaaataatgatttatattatgatatggttttatattattgtttttattggttttagtttaatgggttttttaatattgtaatgataaattttagtgaagtttttaagatagtattttttttattttaagttttataagaaaaattataaaataaatcgtgtttgtaaaattattgttatttgattagttgattagattaataaatattatgattatgattaataaatagtaagtatatagttatttttttaaaagttataaaattttttaggttaggttaattaaataaaagaaaaagttttcgaaaatagtaatgggtttttttaaatttatggtttttttttggggaaattttttttggattaggttatattttataatattttaaatattattttattagagatagaaaaaataagagtaagtaagattttgattaataagtggtttaattatttatttagttattttagaaattaagtattgtaaatatgggtataagttggattaattaggtttggagttgtgagtaatttggtattaattttatttataaaatattaaagtttgattatttaatgtttttatttttgttttggttttaaaattttttttttttagatttttttaattttttagattttatgggattattataattttgttttgcgttgtattattttttgatttttttttttttttaataaaataaaaattttattggaatagtatagttgaattgtttattatgtttgagaaatattatttaaacgatgtgatagatgttaaagattttgagtgtgtatttatataaaggatatgggtttttgtttttttttttatttttaattttaagtttttaatttaaatttttattggttggaaggtggttaaatgtgtaatttgtttttggtttaatagtaatagtaggtttagatatgtaggggaataggaaggtgttaggtttttggtcgtgtttgtggatatttataatagtagaattagtttataatattagagtaatagaatgtagtaaataattttgttgtgtaagtttttaaagttttgtttttataatttttgaaaagattgttgaggagttttgtgtaagttttgtaatttagtagtagtttaaatttttttgttttagtttacgtttatttatttttatttttgtagt

SEQ ID NO: 456 - DNA, 9502 bp, Artificial Sequence
  chemically treated genomic DNA (Homo sapiens)
gttgtagaaataagaatgggtagacgtgggttgaaataagaggatttagattattattggattataaaatttatataaaattttttaataatttttttaaaggttatgaagataaaattttgaaaatttgtataataagattgtttgttgtattttgttgttttagtattgtaaattggttttgttgttatgggtatttatagatacggttaaggatttggtatttttttatttttttgtatgtttgaatttgttgttattattagattagggataagttatatatttggttattttttaattagtgaaggtttaagttgaaaatttaaggttaaggataagaaaaggaataagaatttatgttttttatataagtgtatatttaaaatttttggtatttgttatatcgtttaaataatattttttaaatataataaataatttaattatgttattttaatggggtttttgttttattaaaagaagaaaaaaattaagaagtagtatagcgtaaaatagaattatagtgattttataaagtttagaggattaggagaatttaagaggaaaggattttaaaattaaagtaaagataagaatattgagtgattaagttttaatgttttgtaaataaaattaatattaaattgtttataattttaggtttggttgatttaatttgtgtttatgtttataatatttagtttttagagtaattaagtgaataattaggttatttgttagttagagttttatttatttttgttttttttgtttttgatggaatggtgtttgaaatattataaaatgtaatttaatttagaagggatttttttagaaaaaagttatggatttaaaagaatttattattattttcgaaagtttttttttttatttagttaatttaatttaggaaattttatgatttttgaagaagtaattatatgtttattgtttgttaattataattataatgtttgttaatttaattaattgattagatgataataattttatagatacggtttattttatagttttttttataaaatttaaaataggaaaaatattattttagaaattttattaaaatttgttattgtaatgttgggaaatttattaaattaagattaataaaaataatgatataaagttatattataatgtaaattattgtttttaaaaagaaaagttatatttattataggttttgtttttttaaattaatttattggtatgtatattattagttttttataagtgaagttgaagtgtttattaaaaattttgaattgggggtttttataatttaaagttattattttaagtaataatttgatagtttaggttgaatggcgatatgatgtaatttaaatttaaaatattattattattaaataaaattttaggaaatatatatttataatttgtaataattttttttatttagtgtttgtgttttgaaataatagtttagttttgtttttattgttaataggaggtattaaataatttttgaataagaattataaaaatgtaaaatacgatatgataaagtaaaaaaaaaaaaaaaaaaaaaaagttataaagtttagaggtgtaagtttgtattttttgaaagatttatagggaattttttggaaagattttaaatgtagttttttgtgaaatgtgagagatattaagaaaattagaggaatttgaaattgtagttatagatttaagtcgaattaattttttaggtttggttggatttagaggttatatttttagaattgagtatattttttagagtagttattgagtattttttttttcgtagcggtttaataatttaggaataagtaatttatttagtcgttcgtagggggtagttaacgttaggtgagagtacgggaattaataggattagggttttggaggtaaaggttttagtttagtttttatttagttgtatgatttggataaattatttttttttttttaagattttagtttttcgtttttataataagggtttgtttggattttatttttaaggtattttttagcgttaatatatgattatgttatgttttttcgtgttttttaaaagttaagtatagaggtaaagatgtgtaaaattaaggttttgggggtaaggtggagagtgatttttgtaggatttgaaggggttaggacgtagtagggcgagttcggggttgtttacgcgtttagtttttgagtttttttgttaggttggttatttaggttcgtttttgaattttgtatgcgatttgtttgttttaagtcgttttagaagtatgattaatttttattaaggaatttgaaataattttttttttatttgttttgataagattttagatttaatagttagaggatttttaaaggttgattttagggttgatgtattcgattttttatttgttagattcggtgtggttataagagtataattatgaatgttatattttgttaaggaaataaatcgtgtaaagaaacgaaaaagaaaagaggtgttgggggttaggaagagggaggggagcgggaggaagtgttttgtggtcgttattgtgattcggaggggtttaaatttatttcgttgatttggttaatataatttttgtcgagttgacgttcgtttttgtaagaaacggtttcgagttcgtagtcgggtttttttttttttgaggtaggtttaaggttttcgttttttttagtcgttttttttttgggttatttggagttttagggaatttgcgcggtttcgtttcgcgggggcggtcgagatttcggggcgcggagtcgttgtcgcgtttttttttagtatttttgttcgattttttttttttgttgttagttttagttttcgaaaaaaaaaaaaaaaaaaaaaatagatgatttcggtagttgttttgtgaagttttaaaggcgaaaagtggagttttcgaggggtagtatatcgttttgcgcggttaggtttcggagtaggtatagggagttcggagtttttttaagtcgttttttcgtttttagagtttaattaagtttcggcgttgtttttcgtttagtttagttcgcgggtgttgttgtagggtttttatttacgttttttgtaattttttagcgtcgcgcggggattagcgttcgtaggtttaataataaattagtaggagaaaattaaataatttaaggaaaggcgaatggatttgttttgtttttatggatttcgttttagaattttttcgcgagggtttgttcggttatcgcgtttcggtcggggcgatttaaggcggttgaaggagggtgcgagaaggcgcggcgattttagtcgtatttacgtgtgcgcgtcgcgtagggatttttcgtttgggggtagagttcgcggggatcgcgtttcggttgcgcggtagcggttttgggtgttgtcggtttttgtttttttgagtcgagtggcgattgcgacggttgtcgagttagttttggtattcgtcgttcgtagggagtttcggcgtgtgttgttgggaaagtttagaggtcggtggagattggggaacgagtaattgatagttcggacgaggatttttttttttttttttttttttttttttttatttgttcggttaaaaatgtgaagggattgtatttattttttcggcgagtttttttaagtgtagtgatatgtgcgacggcggcgcgtgtgggtgcgcgtgtaatgtttgtagtggaagtaaaagttttttagagaaaaatgattcgaatttttaaaattaggttttaagataatttgtaaaagtagagatttttttatttttttaaaatttgttttttagtcgtttgttagttgatattggttttcgtttttataaagaatgaatgaaatttaaatgaattatttgtagttattaaataatttagtattttttttgtatttgttatatgttttgtatttttaagtttaaatatattttaatgtatttagtaattacgttgcggatttttcgtcgatattcgcggtattaagttaggtatttggtgggtttttcggggttggtgggtatcgttttgttttcggttggaacgtgttttttttttttttttaaagaaaaatgtatttttatgtaatttgtaaaatgagtcgtagggcgtgttttttaacgttcggatatatttttcgtaaagatttttttatttattagtttttggagcggtttttgttgtcgaggtaggggttttaggttttcggagggtttgatagttttttagatgatttcggaacgaatttttatttgttttcgggagtttggcgtttcgcgcgttttcgcgcgttttcgttttcggtcgttcgttcggtttttcgttatttgtgtcggggttttcgggttatggcgcggcgggcgcggggtttcgtcgagagtcgcggggatcgtatcgggttgtcgtttttcgttgttcgtcgtttgtttgcgttttttttcggttgcgtagcggcgtttcgtatcgttggggcgaagttttttaggagaaagaggaggaggaggttacggaggaggaggagaaggaggaggaggaaataggttgatattaaagtgtaaattttgtaaatagagatgttattaaataaagagttttggatattttttttttcgttaaatttggcgtttttgtagtgcgtacgcgttttgttcgtcgttttcgcggtcgttttggttgtcgttcgcggggttgtcgggttggtcgggtcgtcgtttttattcggcgttcgcgtcgtcgcggtgcgtttagcgcgtcgcgaggttcgggaggcgcgcgggtagggagttcggggttagggaggggtggtcgggggtcgcgacggcgtttttttttgagtaaatttcgttttcgggtcgcggcggcgtcgattcgcgtttagtttcgtcgtttttttttttttttggttgtcgtatcgcggtcgttcggtttcgcgtgttttcgggtagcgggattagagtttttttagtttttatttattgtcgcgggggcggtaagcggtggggggaaattttcgtatagaagattggattttcgttaaggtttataattgtgttttttggagacggggaaattaggagttggaggagtaggggatgtgagtatatgtatttataggttgtttggttagggttttttttttttttttttaaataaataatatttttaatttaatttgttagtgataaaggacgttttaatataagtgggcggtaattattatcgtttattaatggagcgttttagcggagtttttatttttttttcggattttgtagtcgttatcgtcgtattgttatatgttttttatttttattttagtatatattcgggttttatttatttcgtttcgttcggtttaggcggtgtttatcgtatatttttgtttttttttttgtatagagcgcgtattttggattgtatatttgtaaaaaaaaaaaaaaaaaaaaaaaaaaaaaaaaaatatacgggggtttagatagttcgtttttagtagaatttaggaaattttacgtttgtatgtatggttttagaagtaaaatagtttgtgattttggaggtcggtatttttgtttagtgttatttgagggttttattttacgagataaaagttagtaaaggttttcgtgttgtttaatgagggtttttagaagtaaaggaagaagataagtgttgaatttataaggattgatgattggggggattttaggggagttttagttttattttcgtttatagattagaattattggggattttttttttattttttgtatatattaatgtattttttttttaattttttaggagtttgagatttttgttgattgggtttgtgggtgttttatgtgttttagtagtttaaatttagtttagaaagtatttttttttattaaaaaagtatgtttttattaaaatgagttataattttattaaacggtgaagtatgcgaggttttaagattatttggtgttttagattttttttaaaattgttatatagtttaaatttttattaagtgttagttgttagtaaggttttaatatttttttttttttgagaagaaaataatattgaaataaaattattgtgagatatttcggattataattataaaggataaggtaaattaatatttttaaagttaatatttatttttagattttataataattttttttttttatattaaaaataaataaaattttttaaaaatatttagaataaatatttagaaattatttttaaagaaattgtattttggttttcggattgttttatgaatttaattggtaagatttttaattgttgagttttttggatataatgtgagtatttgaattttttgtgaagtgagtttatagttttttttttaagattttaggaggtgtgtaattatttttaagtttttgaatttttttaaagtagaaagatattaagtttagtttttttttttttttttgtaaattatttttttatgtattattttgagaatttataattttttattttttagatatagttttatattttttttttagttgtatgataataatatgtttgggaatatgtatagtttaataaagaatttatatgtagtaattttattaggttaatgttggatatattgttatttgataagtttatggaaaaatagaattaaatggagttattaaaatttttgtatggatgaaattatatttttaaatttattatagaatgtttgtatttatatattttttttttttatttataattattataaaagtatttttagatgataattttatatattttattatttttttttttaagatttgtttgttatattagttattttagttgtggtagggttgtattggagttaaatttgggtatagttttttatttgtagtgtattagaaaggggttagaaaatttttttgtaaaagattagatagtaaatgttttgtaggttatgttgtatatttttttgtgtttttttttgtttgtttttttttttgtttttttttataattttttaaaaatgtaaaaatcgtttttagtttaaaggttgtattgagtttgtaggttaatattagagtagttggttaatattagagtagtgatttttaatttttagagtttaagtgtttaattttttggtttttttgggttatattggaagaagggttatatatgaaatatattaatattaacgatagttgatgagtttaaagaaatattataaaaaaatttataatgttttaagaaagtttataaatttgcgttgggttgtatttaaagttgtttttggttatatgtagtttgcgggttataggttagataaatttgttttcgagtgtattagaattgttgggtgtatttatgaaagatgtatagttttaggttgtttttttagagattatgatttagtaggtttgagatgaggtttaataatttgtatttttaatagtagtttttatggaaggtttgtagagtattggttgataattttagtattagagtgaaggtagattgttttgatatatttttattttttttaaaaataaaaaaatatgtatatttttgagatagggtttttttttattgtttaggttggagtttagtggtattattatagtttattgtagtttttattttttaggtttaagtgatttttttattttagttttttaagtagttagaattataggtatgtatttttatgtttagttaatttttaaatattttgttgagaagaggttttattatattgtttaagttggttttaaatttttaggtttaagcgtttgatttttttgttttagttttttaaagtgttgggattatagttgtgagttattgtatttagtttatttttatttttgttatttgttttttatcgttttttttttttttatttatttttattttttttgggttaaagatttaggttttttataatttaaattaatttaatttcgtgagaaagttggtgttgttgattagagggttgtagttgtttgtttttttttttttcgttattgaattttaattttagtttgaaggaaaaggaatcgtttgattatatgttgtttattattaggatttttttgttgaaaaaagtaagtatttaagggattttattttattttaagtattggagaagggttgaaggataaaatatatataaaagatataaattttagtttttttgtttttaattgttgggaaattttgggtacgtggtggatttttaattttcgtgatttatattttaaagatgaattaggtttattaatggtgaaaatagattagattaggggttttatgtttttattatttatttttttttatttatttaatttagtttggtttagggtattaagagggaaatagttatagtaaatggttaaaatgtagataatttttaattattttagttaatgaagaaaagttgtggtatgtataattgaaatttatagttttgagataaattttatgttgatttttttagaaaattttttagtaatgatagtggattaagtgttattttagtgtagtatgttttatagaatttttataatagtgtagtatgttttatagaatttttataatagatagtgattaaataaatttttattttaaaatgatttttggatttggtattttttgtttgttttcgttttttagatttttattaatttatatatttttatgataattaatttatatatttttattgttgtttgagttgttttgtataaaagttatgagtttttttataaagagggaaggatagtttagagaaagttaaaagtgagagtaaaattatataattagaatttataaggtatgtttttagtataggaaagaaggagttagttagattgtttgaagtaaggagagttttgaaggtcggatttatgtatgtgcgttgaatagtaaagttatattattagagttgtgtgtgtggaagattaatttattagtattgttagatagattggagtgagaagagataaggggaagaggttaggtaattgtttggggtaggatagtaatcgtaagtggaatgaaaaggaggaggtagattagaagaatataggtagagtttttaagatttagtaattgattgggttgttaaggatattagaggtattattaatagaaatagggaagttaagaggcgaagagaagtatgtattgggagatttaaagaggaaagtatgtttagatttcggtatgttaaatttgtggttttttatggaagatattcgggtagagttgtttagtaggtggtagagagtgtgggattagagtttgttggcgaagttaagttgggttaggaatatacgggagttaaattttgtgagttaattgttagatatagttattattaaaaagtaaattatataaatttatagttaaatatattttattttaaaagataataaatatttaaaatttattattttttatt

SEQ ID NO: 457 - DNA, 6120 bp, Artificial Sequence
  chemically treated genomic DNA (Homo sapiens)
gtttatagattagtcggtttttgagtttttcgggttggggttgttttatgtgagttaattttttaggagtttgggtggtcgtagatattaattaatttattattttcgaatgtgtaatttaaggttagataagtggttttttgcggtaaataggattttggggatttaggtttttttagtattgagaaggtttttggttgtatggggagggtttaaagtttgtggttaagttaggatgtagaagataggtgtgtgttttagtaagttagtttcgttgattattagttttatatagtatataggtgcgtgttgttatttgtgtaggtgggaagttcggattgtttgggtttagggttttttggttttttatgttattttagtattatttagtgattgtttgggttttatggttttagtttttatagttgataggatagaggttgatgatagcggtagttcgtgttgatggttagcgtttttgggttaaggattttgtgtagattgattgtttgtattttcggggaatttggggagaaggagttttgtttttttattgaggtacggagattttgggtaattcgttaaggatatggggataagagatagagcgtagatatatttagagttttttgtagtttttttattatgttattgttttaggttatatttagatagttttttgtaggagagaaaattttggtagaggggtaggaaatattgttattgtttgttgagtttattgatgtattattgggttttatttttaaggtagtgtttatgttattgtttttatgttatagaggatgatatcgaggtttagagaggattatagaagttgttgagtggtgtggttagtttggttttggtgttgagcgaaaaggatggagatttttttaagggaaggggaggagaagacgggtagaggggaaagaagaaaggagggcgagggaaggaaatttataagagaataaagtgtggggatatggaaaattgaagtgggtaaagtgataatgataggttagtgggagtaggtgggtaggttggtgggaggaggtgggttttttttgaattttttagggtttttgatggatatgtaggtttttgttgtttttgttcgggtattcggtttttaattaggttttagggaggatgtaaaaggggtttttttttaggttaggttgagggtttttttgtaaatatttttgagggtatttgaggtttataggtaggtaggatttgtatagttaggtaaagtttgttttgtatagttatattttgtaggtttaggttaggtgttttgtgagtatgtttatggaagtagtatatttggtatagggtgggttggttgagtagtttttttgagtgttttgagagttagttggtggttattggtttttttttcgtagttgttttggagggtattaatagtaaggttagggaggtaaatcgtggggagtagtagatttgttttttattttaatagttcgatgggggagtagagggtagtggtagatagatgggaaattgaggtatcgattattttgttaatagtgtatatagttagttttagagtttgtgtttttaattattatgttatattgtttatgggagggatttggatttttgtttacgtttattttgagaggtttcggttagtagttttaggaatgttatttagttttttagtattattaggatcgagttgcgtttttgaatgtgtttttttttatttgtaagttacgaggtatttttagagttagagttttttgttattgtatttagttttattttaattatgttttttagtgtaggtagagatttttatgttatttgggttagaggatatagagtatttcgttcgtttttcgttaggtaaatttgtataggtatggtttagatttttgtttatgatgggtttttttttttttttttttttttgtgttgcgttttggtgttttggggttagatttgaggtgttttaggtaatttttatttgtttagaagtaatgaatgatttttaagtttttatatgttataggaagatggtgtgagtcgtttgtttattgagtattttattttgtattggggtagagttttgaaaatattatttttttatagttattagggaaggatattgttttagtttttatttgagagatgataaaattgaagttgaggagtaatgtatgtaatgttatataattatgaatggtaaaatttaaatttaggtttaattattttaagtagatgtttgtattagaattttttggggaattttttttttttttttagagatagcgttttattgtgttgtttaggttggtttcgaatttttggttttaagtgatttttttgttttggttttttaaagtattgggattataggtgtgagtttttagtttggtttttgaattttttttttaatatggatttttagggagtgggggatttaggatgtgtgtttttataaaagttgttttgaagattttttaaggggatttgcgggtagggataggaagtattgattatattgtgatgtgtttttttttagtttttagagagttcgcgatttttagtagggtagtgtggttagggtgttcgagtttaggtttaggaaggtttaatggttataatttattaagggttttttgtttgtcgggtattgggttttatttttatatgtatttttttttttagttttatttttttttttgaaagggagatgtttatagttggggaaattgaggtttagagagatgattaaggggagttaagaaagagaggtagagttttttgtaggttttttttattttatggattgagagaagttagggttaggatttttgggtagttaaagatcggtacgtttgttttgtattttatttggtttttatttttttttgtgagattttagggggtggtttcgttttttttttgttgggtaaggagtttttttttgttgtttgatgttttggatattgagtttatatttaggtagggttgaatttttttttttcgtagtttttgaggttagtaggttttgggttttataattgttttttgttgagcgattttttggttagatttttgggcgtgtacgtagtagggaggtatgtatttgtgtgcgtgtgtgtttacgtatgggaatataggtgtatgtatgtatgtatgtgtatagggtatatttatgtgagggttttttagatttttttttaaggagtaaatgatatttttttatagtgttaggtgtttatttaggatttttaagggtgagggtggagcgagagcgtggaaaggtttaaggtaggttaggtaggagtatagttttagatggttttttaagatggttatatagagtttagttagatattaatgttagttaagggttggttagggtggttttcgggaggtgtaggggtggggttatttaagtttatttatttttttttttatttatttaggaggtaattataggagtttgtttgtagttaaaagatgtttttagtttttttttatttattaggttttttttttgggtataggtttgagtgtgtagtttaggtagttattggtattagagatggaatttgtttgaatttaagggagttttttgtggttaattttagttttataaattggaagggtgtggtaggtagtcggagtttagtggtttatagtgttttttttgggttggtaggtttgtgtttcggttatttgttttttagtaagttaggtttggatattacggttggttgagtgtaagttagtttttgttttggtagtttttttttttgtttgtgagggtgattttattttgattttatatttgtagtgatgtgtagattatttatttagttttgagtttagttaggtaagagggcggggttttgtatatagtaagtaagggagcggttggtttaagggtgttttgggtttaggttttttggttttttttttttaagggtttatgggtttttttttttttatttttttgcgtttaagtgtaggttagattttaaaaagtagtcggggatggggcgagaatagaggatttttttattgagtttatatttaattttatttagaatttttttttaggtttagttgttgttttttattaggggtaaatgtgtttatgcgtattatttttattatttttttgggggaaaattggatttttttttttttttcgttattcgtttttcgattttgttagtttattttttgagagtttttttgtgtaagggatgtaagggttattagtattaggtttttgaaaggacgtcggagttagttttcggtttttaagggttggattagtgttggaggggggaattataaattgtttttttaggattttattttttttattattttaggatgttgaaaaaggttattttgtttttttttttttgtttagttttttttcgttttttgttttcggttttagtagaggtcgcgtttttattgcgtttttcgtttttgagaaatggcgtagtaagcgtttcgcggagagtttggaggcggggcgtttttttttgagttcgcggggtcgtatttcgagttagtcggttagatttgtatttcgcgtagtatttttgttttttttgtgtagcggaaagggtaaaaggtagggattgtaagcgggcgcgtatcgggtaggaagagcggttttgcgtaggtgcgcggattcgggtttttgggttttattttcgtcgcgtatttcggggttcgtattcggtttttgtcgggtttttttcggtcgtatttcgttttcgtatttcgtttttttttaagttttattcggtttaagtcgcgcgtttcgtattgagtttttatacgcgtcgcgtttcggtcgtatttcgcgtagttagagtaagtattggagtttcgttttttttcgtattttattcgttttcggtttcgtttggtttatttttggatcgttttcgtttcgtttcgtttttattcgttttttcggcgtagtcggcgtttatttcgttttagtttcgcgatcgaagtagggcgcgtagtagcgttgagtgtttcggaacgtgcgtcgcgtttttagtgttcgtcgcgttcgtcgcgtttcgggcggggatggggcggttagattgagcgtcgtattcgttatttagattcgtcggttttagtcgtagtttttttagtcgtggttttagcgcgtacgggcgatggcgaaggcgacgttcggtgtcgtttttattacggttgtacgtttttttatttttggtgaatagggttttaggtttaagatagtagtatttttgtgtgtttttgttatttgtatatttatattgtttgttatagtatgtggtattgtttattttttggtttgtgttttttattaaagtgtaagttttaggagggttgggattaagtttattttatttattattttatatttagatatttattgagtgatttatatatttgtaggtttaattttttttttttttttgagcgttatatttaaaaattagattgttattgggcgtagtggtttatttttgtaattttagtattttgggaggtcgaggtgggtagattatgaggttaagagattaagattattttggttaatatagtgaaatttcgtttttattaaaaatataaaaattagttgggcgtggtgatatacgtttgtagttttagttatttgggaggttgaggtagaagaattgtttgaattcgggagatggaggttgtagtgagttaagattgtattattgtattttagtttggtgatagagtgagatttcgtttaaaaaaaaaaaaaaaaaaaaaaattagattgtttcgtagatgcgtatgttttttttttaaaggtattttaaattattgtgtttaaatttgtattaatttttttttgattttattttagttagtgattttatatgtatgtatgtatatatatatatatatatatagatatatatatatattatatagtattatattgttattatttgtttatttttttgttttttttattagattggttttgtttttaaaattgagattatgtggtattttttgtattatataattgatacgaaggtattcgattttttttagttgatttaaattaatagaaat

SEQ ID NO: 458 - DNA, 6120 bp, Artificial Sequence
  chemically treated genomic DNA (Homo sapiens)
atttttattggtttaggttaattaaaagaaatcgagtgttttcgtgttagttatgtgatataaagagtgttatatggttttaattttgaggatagggttagtttagtgaaggagatagaaaaatagataaataataataatatagtgttatgtgatatatatatatatttgtatatatatatgtgtgtatatatatatatatataaaattattgattagagtgaagttaaagaaaaattggtatagatttaaatatagtgatttgagatgtttttgagagaaaagtatgcgtatttacgaggtaatttgatttttttttttttttttttttttagacggagttttattttgttattaggttggagtgtagtggtgtaattttggtttattgtaatttttatttttcgggtttaagtaatttttttgttttagttttttaagtagttgggattataggcgtgtgttattacgtttagttaatttttgtatttttagtagagacggggttttattatgttggttaggatggttttgattttttgattttataatttgtttatttcggttttttaaagtgttgggattataggagtgagttattgcgtttagtggtaatttgatttttaagtatggcgtttaggagagagaagaaggttagatttatagatgtgtgagttatttagtaaatatttgggtataaaatggtgaataaaatagatttggttttaatttttttgaggtttatattttagtaggaagtataaattaggaaatgggtaatgttatatattgtgataagtagtatgaatgtataggtgataagagtatatagaagtattgttgttttagatttgaggttttatttattaggggtgaaagaacgtgtaatcgtggtgaagacggtatcggacgtcgttttcgttatcgttcgtgcgcgttggggttacggttggagggattgcggttagggtcggcgggtttggatggcgggtgcggcgtttagtttggtcgttttattttcgttcggggcgcggcggacgcgacggatattgggggcgcgacgtacgtttcggggtatttagcgttgttgcgcgttttgtttcggtcgcgggattgaagcgaggtaagcgtcggttgcgtcggaggagcgggtaggggcggggcggggcgggggcggtttaggggtgggttaggcggggtcggaggcgggtggggtgcgggaaggggcggggttttagtgtttgttttggttgcgcggggtgcggtcggggcgcggcgcgtgtaggagtttagtgcgggacgcgcggtttgggtcgggtggggtttggggaggagcggggtgcgggagcggggtgcggtcgaaaagggttcggtaggagtcgggtgcggatttcgaggtgcgcggcggggatggaatttaggagttcgggttcgcgtatttacgtagagtcgttttttttattcggtgcgcgttcgtttgtagtttttgttttttgtttttttcgttgtatagagagggtagggatgttacgcgggatgtaggtttggtcgattggttcggggtgcgatttcgcggatttagagaagggcgtttcgtttttaggtttttcgcggagcgtttgttgcgttattttttagaggcgagaggcgtagtgggagcgcggtttttgttggggtcggaggtaggaggcggggaagagttgagtaggggaagagaggtagaatagttttttttagtattttggggtagtagagagggtagggttttggaagggtagtttgtgatttttttttttagtattggtttaatttttggaaatcggaaattggtttcggcgtttttttagagatttggtgttggtggtttttgtattttttatataggagaatttttaggagatgggttggtagagtcggagagcgagtagcgaggaggaggaaagaatttaatttttttttaaagaaatgatggaaatgatgcgtataaatatatttatttttaatagggagtagtaattggatttgagaaggggttttgggtgaggttggatgtgggtttagtggggaagttttttgttttcgttttattttcggttgttttttgaggtttggtttgtatttaggcgtagagggatggaagaagggaagtttatgggtttttgaggaggaaaagttagggaatttgggtttagggtatttttgagttagtcgtttttttgtttgttgtgtgtagaatttcgtttttttgtttggttgagtttagggttgaataagtgatttgtatattattgtagatatgaagttaaagtgaagttatttttataggtaggagggggagttgttaagatagaggttggtttgtatttagttaatcgtgatgtttagatttggtttgttgaggggtaggtggtcggggtataggtttgttagtttaggagagatattgtgggttattggatttcggttgtttgttatatttttttagtttatggagttagagttggttataaggggtttttttgggtttagataggttttatttttggtgttagtggttatttaggttatatatttaggtttgtgtttagggaagggatttgataggtagggaggggttgggggtattttttggttatagataagtttttgtgattgttttttaggtgaatgaagagagaagtgggtaggtttaaatagttttatttttgtatttttcggggattattttggttagtttttggttgatattgatgtttggttgggttttgtgtggttattttaaggggttatttggggttgtgtttttgtttagtttattttaggtttttttacgttttcgttttatttttatttttgggggttttgagtgaatatttgatattatgagagggtgttatttattttttggaaaaaggtttggggggtttttatatgggtgtattttgtatatatgtatatatgtatatatttgtgtttttatacgtggatatatacgtatatagatgtatatttttttgttacgtgtacgtttagggatttgattaaagggtcgtttagtagaggatagttgtgaggtttagagtttgttggttttagggattgcggggaaaggagatttagttttgtttgggtgtaggtttagtatttagaatattaggtagtaggaaggagttttttgtttagtagaggggaagcgaggttattttttgaggttttataaggggaggtgggggttaggtgaagtgtaaagtagacgtgtcggtttttggttgtttaggagttttggttttggttttttttagtttatggggtggggagggtttgtagggggttttgttttttttttttgattttttttagttatttttttgagttttagtttttttagttataaatattttttttttagaagaaggggtgaaattagaaagaggggtgtatgtgagggtagagtttagtgttcgataaataggaagtttttaataagttgtagttattgggtttttttgggtttgggttcgggtattttggttatattgttttgttgagggtcgcgggttttttgggagttggaggagggtatattatagtgtggttagtgttttttgtttttgttcgtaggtttttttggagaatttttagggtagtttttatgaagatatatattttgggttttttattttttaaaaatttatgttaaaaaaaaagtttaggggttaggttaagggtttatatttgtaattttagtattttgggaggttaaggtaagaagattatttgaggttaggagttcgagattagtttgggtagtatagtgagacgttatttttaagaaaaaaaaaaaaattttttaagaggttttggtgtaggtatttgtttggagtgattagatttgagtttgaattttgttatttatagttgtgtgatattgtatatattattttttagttttagttttgttattttttaaatggggattgaaatagtgtttttttttggtgattgtgaggagatggtatttttaaggttttgttttagtgtagggtaagatgtttagtgggtaggcggtttatattatttttttgtagtatgtgagaatttggaggttatttattgtttttgagtaggtgaagattatttggagtattttaggtttgattttaaagtattaaaacgtagtatagggaagggagggaggagggaaatttattatggatagagatttgggttatgtttgtgtaggtttgtttggcgggaggcgggcgggatgttttgtgttttttgatttaggtgatatgggggtttttgtttgtattgagaagtatggttggagtgaggttgagtgtagtgataggaaattttggttttgggggtgtttcgtgatttgtaggtagggggaaatatatttaagagcgtagttcggttttggtgatattggaaggttgggtggtatttttggaattgttgatcgaggttttttagagtgggcgtgggtaggggtttaggttttttttatgggtagtgtgatatggtggttggaagtatagattttgaggttggttgtgtgtattgttagtaaagtggtcggtgttttagttttttatttgtttgttattgttttttgtttttttatcgggttattgaggtgaggggtaggtttattgttttttacggtttgtttttttggttttgttgttggtgttttttagggtagttgcgaggaggaagttagtgattattagttagtttttagggtatttagaggggttgtttagttagtttattttatgttaaatatgttgtttttatgagtatgtttatagaatatttggtttgggtttgtagggtgtggttgtgtaggataggttttatttaattgtgtaggttttgtttgtttgtgggttttaggtgtttttaggggtgtttgtagaagagtttttaatttggtttgggagaagattttttttgtattttttttggggtttgattaggagtcgggtgttcgaataaaagtaataggggtttatatatttattagagattttggggggtttagagaaagtttatttttttttattagtttgtttatttatttttattaatttattattattattttgtttattttagttttttatgtttttatattttgtttttttgtgaatttttttttttcgtttttttttttttttttttttttgttcgttttttttttttttttttttggaggaatttttatttttttcgtttagtattagagttaggttagttatattatttagtagtttttgtggttttttttgggtttcggtgttattttttgtgatatgagagtaataatatgggtattgttttgagggtaaagtttaatgatgtattagtgggtttagtagatagtggtagtgttttttgtttttttgttagggtttttttttttatagggggttgtttaggtgtggtttggggtagtagtatggtgggaaggttgtagggggttttgagtgtgtttgcgttttgttttttgtttttatgtttttggcgggttatttagagttttcgtgttttagtgggaaggtagagttttttttttttaagtttttcggggatgtagatagttagtttgtatagagtttttagtttagggacgttggttattagtacgagttgtcgttgttattagtttttgttttgttagttgtaggagttgaggttatgaggtttaagtagttattggatggtgttagggtggtatagaaagttagggggttttggatttaaatagttcgggttttttatttgtataggtgatagtacgtatttgtgtgttgtgtggggttggtggttaacgagattggtttgttagagtatatatttgttttttgtattttggtttggttataggttttgagttttttttatgtaattagaagtttttttagtgttggagggatttgggtttttagagttttatttgtcgtagaggattatttatttgattttgaattatatattcgggagtggtgggttgattaatgtttgcggttatttaggtttttgggggattggtttatataaggtagttttagttcgaggggtttagaggtcggttggtttgtggat

SEQ ID NO: 459 - DNA, 2310 bp, Artificial Sequence
  chemically treated genomic DNA (Homo sapiens)
tgatatttgattatacgttaatttttgatgatagaaacgatgttatttattttaatatttttagcgtaagagaaaatcgataattaaaatatttgtttaattaagtagagtaaaaattagcgggaataagataggaaaaatgagatcgaaataatagaatatttattattggatgttaaaatttttataggatttattgtaggaggattgtaaagggaaagaaattttaacggagtagttttttagatgggttgttaataaattataatttggaagtagtagtagaaagttgcggcgttgttttagaaaggtgatcggcgttttttagaaatgaaaattggttaggtaataggtttgagtttttcgagttaaaagagaaaggtaagagcgatagcgattcgtagattggtagaatggaggagcgtttagggtgagagaaatttcgaatacgaagtcgaagcgagagtacgtagggtagttggcgggagaatttcggtttcgcggtcgtatcgggtagttcgttttgagtttgtttttttatagaacggttaggaagttttaaaagatgtgtagttcgggtaggtattttggcgtgataattttcgtgtgtgtgtgtgtgtgtgtgtgtgtgtgtttttgaatgtaatagggtgcgtcgttcgcgaattttcgcgtgcgaggaagattggagattcgttcgttcgcgtttagtcggttttagaggaaattcgtttttttcgtttagtcggttttttacgcggcgagtcggggcggggcgggttcgaggttacgtttaagttgaggtatagttttataggtcgttcgggtcgcgttagttcgcgtttcgtttcgcgattatatttttcggtaagtttcgggtcgttagcgcgtcgtagttgatttatttttcggttcgttacgggttcggtcggttttcgcgtttaggaggttgttttttgttgattggggtgtgggcgggagcggcggagggaggaggaggcgttgtttgtcgtcgttgttgttttcgttgttgggcgtcggggtagtttttcgggtatttgcggtcgttatggacgagtaggcgggtttcggcgttttttttagtaataattattcgggcgtcggcggtgttaaggggttcgggtttttggcggaggttgtcgcggtcggcgacggggcggttgcggcgggggcggttcgagtttagtatagtttttcggggattttgtattttttgtagtacgagtgggttcgtttcgaggtggagagagtttagtgggaggtggagcgggcggagttgtaggtaaagattttttcggtttggtcgtttttatttcgtttttttgttttttttcgtttcgtttcggattttttttttttttttttagttttttcgcgttttttttttttttgttgtcgtttattttattcggagtttcgtttttttttttttttcgttttttgtttttcgttgattttatttcgattttgtttttattttcgtttttggtgcgttgtttattttttttacgtttgttcgttcgttttattttatttttaatttttagatttattttaattttttggttattttgtattttagggttgttttttcggtttattaattgggttggtagtagttttgagagacgcggagtaaatcgttcgttgttttggtgtgtttttttttaggtttagagatagttttcgtagaacgtgtcggttttggtttttttttttaaggaaggtgattaagaagataatagaagttgtgttaggttttgagtcgaggcgagaagttgacgttgggtaaaagtgttatttatatattagatttttttttttatatatgtaaatgtttgttttttattttttttcgatttttcggtttttttttacgttttttttaggtatttttaattaatgtattttgaatgaaggatttagatgatcgtagttagagagaatggttaagaggtggtttttgtttttagaatttgaaattttttaagggttaattttatgtttagtgttttgggagatttttttgtgttttaaaaggaattaaagggattttgaagttagttatattgttttgtataatttgtaagataaagtatatttagggaggagataattgtgggttttgaaaagaatgaaagtgaggttgatattttataagttatttagaattggtgaataggtttttagtggttgtttttaaaatttttagggtatatatattaattttaaaaggaatttaaagaattatgaatagttgtgtttttttgttttacgggttaagtttgt

SEQ ID NO: 460 - DNA, 2310 bp, Artificial Sequence
  chemically treated genomic DNA (Homo sapiens)
ataggtttagttcgtaaaatagaaaggtataattatttatagttttttaagttttttttgaaattggtgtgtatgttttggaagttttaagaataattattgaaaatttatttattaattttgaatggtttgtaaagtattagttttatttttattttttttagagtttatagttattttttttttggatatattttattttgtagattatgtaaggtaatgtaattaattttaaagtttttttagttttttttaaagtataagaaaattttttaaaatattgaatataaaattaatttttgggaagttttagattttgagaataggaattattttttaattattttttttgattgcgattatttaggttttttatttaaaatgtattaattggaaatatttaaaagaaacgtgggagggggtcggggggtcggaagaaagtggagaatagatatttatatatataaaaaaagggatttgatatatgaataatatttttgtttaacgttaatttttcgtttcgatttaaggtttgatataatttttgttgtttttttgattattttttttgaagagaggggttaaagtcggtacgttttgcggagattgtttttagatttaggaaggggtatattagggtagcggacgatttgtttcgcgttttttaaaattattgttagtttaattagtaaatcgagagggtagttttgagatgtaggatggttagagagttgaaatgagtttgggagttaagagtgggatggggcggacgaataggcgtggggagggtaaataacgtattaggagcgggagtgagaatagggtcgaggtggggttagcgaaaggtaaaaggcgaagagaagaaggggacggggtttcgggtgggatgggcggtagtaaagggggaggggacgcgagaaggttgggggagggggagaagggttcggggcggggcggaagggagtaaagaggcgggatgaagacggttaggtcgggagggtttttatttgtagtttcgttcgttttattttttattgggttttttttatttcgaagcgggtttattcgtgttgtaggaagtgtaggattttcgggagattgtattgggttcgggtcgttttcgtcgtagtcgtttcgtcgtcggtcgcggtagttttcgttagaggttcgagttttttggtatcgtcggcgttcgggtggttgttgttgaagaagacgtcgggattcgtttgttcgtttatggcggtcgtagatattcggggagttgtttcggcgtttagtagcggaggtaatagcggcggtaagtagcgttttttttttttttcgtcgttttcgtttatattttagttagtagggagtagttttttgggcgcgggggtcggtcgagttcgtgacgggtcgggaaatgggttaattgcggcgcgttggcggttcggggtttgtcgggaaatgtagtcgcggggcggggcgcgggttagcgcggttcgggcggtttgtagggttgtgttttagtttgggcgtggtttcgggttcgtttcgtttcggttcgtcgcgtagggggtcggttgggcggggagagcgggttttttttggggtcggttgggcgcgggcgggcgggtttttagtttttttcgtacgcggaagttcgcgggcggcgtattttgttgtatttaaaaatatatatatatatatatatatatatatacggaagttgttacgttaagatatttgttcgagttgtatattttttaaggttttttggtcgttttgtgaaggaataggtttaaagcgagttattcggtgcggtcgcgggatcggggttttttcgttagttgttttgcgtgttttcgtttcggtttcgtgttcggagttttttttattttagacgtttttttattttgttaatttgcgggtcgttgtcgtttttgttttttttttttgattcgaggggtttaaatttgttatttgattagtttttatttttaaggaacgtcgattatttttttaagataacgtcgtagttttttgttgttgtttttaaattgtggtttgttgatagtttatttgaaaaattgtttcgttgaagtttttttttttttgtagtttttttgtagtaaattttgtaaaagttttagtatttaataatagatgttttgttatttcggttttattttttttattttattttcgttgatttttattttatttaattgaataaatattttgattatcggtttttttttgcgttgggaatattaagataaatgatatcgtttttgttattaaagattggcgtataattaaatatta

SEQ ID NO: 461 - DNA, 6292 bp, Artificial Sequence
  chemically treated genomic DNA (Homo sapiens)
aaaatgtatagaatttataaagtaattaaataattgagattataaggtaattagttaatgttataaaaggaagaaaatttaatatattaatattaagtttgaatgtaaatggttgaaatgttttatttaaaagatatagagtggtaaattggataaaaaaataagatatttttgttgtttttgagagatttattttatgtgtaatgatattaataggtttaaagtaaatggatggaaaaagatttattatataaatgaaaaataaaaaaggagaggtattgttatttttgtattagataaaatagatattaaattaataatagtaaaaaaaatataaagaatgatattatataatgatgaagtgtttaatttaataagaagatttaattgttttaaatatatatgtagttaatattggagtatttagatttttagaataaatattattagatttaagaaaagagatatatagttgtataataatcgtggaggattttaatattttatcgatagtagtaaggagattagttaggtagattattaggtagaaaattaataatgaaattgtggatttaaattgggtttttgattaaatagatttaatagatatttatagaatattttatttagaaattatagaacgtatattttttttatttgtatatggaatattttttaaaattgattatatgtttagttataaaataagttttaataattttttaaaaattataattatattaagtatttttttagattattgtggaataaaattagaagttaatatcgagaattcgtagaattatagaggtatatggaaattaaataatttgttcgtgaatgatttttgtgtaaataatagaattaaggtagaaatttaaagaaatttttgaaataaatgaaaatagaaatataatatattaaaacgtttgtgatatagaaaaaataatgttaagaggagagtttataatattaaatgtttatataaaaagagagaaagattttaaattaataagttaaaatagttaaatatattagaaaagaataaattaaatttaaagttagtagaaggaaataataaaggttagagaataaggtaatgaaattaggattaaaaaagttatataaggaattagtaaaattaaaaagttggttttttgtaaggatatatataaatgatagattgttagttagattatgtaagaaaaaagaagatttaaataagtataattaaaaatgataaatgagatattgtaaaggatattatcgatataaaaaaagatttttagaatatttttgtgtgtagaaattagaaaatttagagaaaatggatatatttttgtaaatatattattttttaagattgaattagaaagaaattaaaagtttattagggttagtgttaataggaaatgtgggattgaagtttttagagtttttattggggtattatatattggagttgtgggaatggggttgttatttcgagatttttgaatggtagagttatgggaagtttttattttgagtttagaaatattataggtacgtaattttgatttaagatagtagttatggtgattgtatattgtaaagttatagaggtagagttgtataaggttttgggaatttattttttgtataagtgtgttttggatgcgggatatgaaattaagaattattttggagtttgaaggtttaatgtttgttttattgggttttagatttgtttgaggtttgttgttttttttttttgtttaatttttttatttgggaatgggaatatttatttaatatttgtattgtattgaatattggaagtaaataagttggttttgattttataggtttatagatggaggaatgtattttgaagtttagatgagattttggatttttgagttgatgttgaaatagtttgagatttttggggattattgggagaggataattgtattgtgtaatatgagaaggatatgagatttgggagttatagggatgaaatgatattgtattgtgtaatatgagaaggatatgagatttgggggttataggggtgaaatgatattgtttggatgtgtttattttttaaattttttgttgaatgtgattttaaatgttggtggtgggtttagtggaaggtgttgaattatgggagtggattttttataaattgtttagttttatttttttggcgattagcgagtttttgttttgttgtgtcgtacgagagttggttgtttaaaatattttgttatgtttttttttttgtttttgattttttttttgatacgtgatattttggttttttttttgtttttttttgtgattggatgttttttgaggttttatttaaatttgagtaggtgttggttttatgtttttattgtttgtataattataaattaaataaatattttttttttataaatttaaaaaaatttgaatagattagtagttaattatgaaattgaatttgtattaaaaatatttattaagtaggagaagtttaggattagatgaatttatagttgaattttattaaatataaaaaaaatagatggtattaattaaggaatttttttttaatttattttataaaattagtattattttgatattaaaatttagtaaggaaataataataataaattataggttaatatttgatgaatatagatgtaaatatttttaataaaatgttagtaaattaaatttattagtatattaaaaatgtaatttattattattatataggttttatttttgagatgtaaggattatttaatatatgtaaattaataaatgtgatttattatataaataaaatttaaaataaaaattatatgattattttaatagatgtagataaaaatatttaataaaatttattatttttgttaggtgtagtggtttatatttgtaattttagtattttggaaggtagaggtggggtaattaatagaggtcgggattagtttgattaatatggagaaattttatttagaattaaaaatgtaaaattagttgggcgtcgtggcgtatgtttgtaattttaattatttagaaggttgaggtaaaagaatggtttgaattcgggaggtggaggtggtagtgagttaagattatattattgtattttagtttgggtaacggagcgagattttattttaaaaaattaaattaaattaaattaaaataaaaaaaattttgaaattatattaattattttttttgatcggaatggaagagtattaaaaaattagtaataggaggaatttttttttcgatcgtttttggttttttttttcgttattttttttttttttttatttattttaaaattttttttttattattttttttttattgtttttttgtaaagttttttatattatatcgtttattttcgttttttttatttatttattttaaaatttgtttttatcgtgttttttttttttttttggttattttttttttcgtttttcgtttttattatttttttttgtttttttatttttttaaaaatattttttttatttttttttaaagttttttttttatttttgttgttcgttatttttttttttttttttcgtttatttaaaaattgtttttttatcgttttttttttttttttttttgttatttttttttttttttatttatttaaaaaatatttttttgtcgtttttttgtaaagttttttttttatttttgtttattacgtttttttaatttatttatttttttaatttttttttgttatttttttataaagttttttttttttttcgttcgttttttttttttttttattttgtttgttattttttttttgttttttatttattttaaattattttttttatcgttttttttttagttttttttttttattttttttggttatattttttattttttttttatttgttattttttttttttttttcgtttatttaaatattttttagttattgttttttttttttatatttttttttttgtttatcgttttttagtaaaatttttttttttttcggttcgttattttttttattttttttttattggttatttttttttttttttttatttatttaaaagtttttttttttattgtttttttataaaatttttttttttttttgttcgttatttttttttttttttttttttttgtatttttttttttttttttatttgttattttttttttttttttattatttaaaatttttttatttatagtttttttttttttttttttttttttattatatttttgtaaatttttttttttttttgtttattttcgttttttttttacgatttttttttatttttttttatttatttaaaaattttttttttattatttttttgtgaaatttttttttttttttgtttattattttgtttttttttttttatttattttttaatttttttttttaatattttttttttatcgtttttatgtaatgattttttcggttcgttatttttttttttttttggtattaattattttttttatttttttatttattttaaaattatttttttttttttatttttttagttatattatagtgtttgtcgttattaattgtagggaggttagttacggtgtagtaggttatagtttttagtttgttttggttttttaagtcgggttcggagtagttcggtgagtagatatagaagaatttggaatagtttgatttttttttagttttatttatgtattgaagttatgtatatgcggttcgtggattatattttttaggattggataagagaaagttcggaggtttattttgattggattttgttattatgttttgattggatgaaagttttaggataattaattagagtatgaaaataaagtttaattagagaaggtttagagatttttttttatttaattagaatatgtagtttagaaattatgcgcgtaattttatgtgtatgtcgagtaggttttacgttagtttagggtttttggtatttttcgttgagttgttttgttttcggtttagaggattaggagaagggggagttggaggttggagtttgtaatatcgtggttcgtttcgttttggatggtggtggtaatagagatggtagcgtagttggagtgttaggagggcggtttgagcggtaggagtggggttggagtagtaagatggcggtcggagtagtaagatggcggttggagtggtaagatggcggttggagtggtaggagtatagtttgagtggtaggagggtggttggtagttggagttgtttttgatcggttagagatttaggagaaggtggggattgtgtttaacgttggaggttgtagttttggttatcgcggttcgtttggttacggttggtagtggtgacggagattgtatttttgttagagtagtagaaaggtggtagggtaggtgtgttttttgcggttgtattgtttgtttgcggggtggtgggggagcgggtttggtgtgtttttggagttgtattttttgtcgtggggggttggtgggtggtattattaggtgttgaattgttggtagtggggtaggtttgttgcgttattagagtttatattgtttaaggtggtggggggttggaggtaggttgtgtgtgtcgtcgtgtattgttagcggaaggtggtggggaattaggggtattattagttgttatattggtcgatgtagggggcgggttgggtgagttattatgagttataatgttagtaataatgttaattggtaggtagtcgggggtgttttatgggagttgtgaaatgttgtattgtttatggaggaaaggggaatttttgttcgtgttggaacgcggagggtgtatagagtttttgtggtaattttttgattatcgtagggtttttatatttattatggttattcggtttttgtttttttgttttgtgttgtgggtattatttgggagttttaggtatggagtagtgggtattatgggggtttagggttttgtgggtggaggagttaggaatgggaattggtatttgggtggggaggattggttgggtttgagtttttgttgtttttgttttttaattagtttcggatattgtggtgtttttagtttttattttaggttaggaggttagtttggtttaggaggagaggttggattttggagggtgggtgtgagtgttttcgttgaaattggttttagttatttagtgggtagtatgatagggtgaggttttaatattgttattttttgtattttattgtagg

SEQ ID NO: 462 - DNA, 6292 bp, Artificial Sequence
  chemically treated genomic DNA (Homo sapiens)
tttataataggatgtagaaagtggtagtgttagagttttattttgttatgttgtttattgggtggttggggttagttttagcgaaggtatttatatttattttttaaagtttagtttttttttttagattaagttggttttttgatttggggtggggattggagatattatagtgttcgaggttagttggggagtaagaatagtagaaatttagatttagttagttttttttatttaagtattagtttttatttttgatttttttatttataggattttgagtttttatggtgtttattattttatgtttggggtttttagatggtatttataatatagagtaagagggtaagggtcgggtaattatggtgggtgtgagggttttgcggtggttagaggattgttataaaaattttgtgtatttttcgcgttttaatacgagtagaagttttttttttttttatggataatgtaatattttatagtttttataaagtattttcgattgtttgttagttggtattgttgttgatattgtagtttatgatagtttatttaattcgttttttgtatcggttagtgtagtagttaataatgtttttaattttttattatttttcgttggtagtgtacgacggtatatataatttgtttttaattttttattattttaggtagtgtagattttgatagcgtagtaaatttgttttattgttagtaatttaatatttgatagtgttatttattagttttttacggtagggagtgtagttttaaaagtatattaaattcgtttttttattatttcgtaagtaggtagtgtagtcgtagagagtatatttattttgttatttttttattattttaatagagatgtagttttcgttattattattaatcgtagttaggcgagtcgcggtggttaaggttgtagtttttagcgttgggtatagtttttatttttttttagatttttagtcggttaagagtagttttagttgttagttatttttttattatttaggttgtatttttattattttagtcgttattttattattttagtcgttattttattgtttcggtcgttattttattgttttagttttatttttatcgtttaggtcgtttttttaatattttagttgcgttgttatttttgttgttattattatttagagcgagacgagttacggtgttataggttttagtttttaattttttttttttttggttttttaagtcgggaatagagtagtttagcgggagatattagagattttaaattggcgtgaggtttgttcggtatgtatatggggttacgcgtatggtttttggattatatgttttgattgggtgagagaaaatttttaggttttttttgattggattttatttttatattttaattggttgttttaagatttttatttaattagaatatgataataaagtttaattagagtaggttttcgggtttttttttatttaattttggaaagtgtagtttacgaatcgtatatgtataattttagtatataaatggggttgaagaagagttaggttgttttaggtttttttgtgtttgtttatcgagttgtttcgagttcggtttagaggattaggatagattggaggttgtagtttgttgtatcgtggttggtttttttgtagttggtggcgatagatattgtagtgtggttggaaaggtaggaaggggaaaatagttttgggatagatggaagggtaaagagggtggttagtgttaaaaggaaaaaaggatggcgagtcggagaagttattgtataaagacggtgaggaaaagatgttgggaaaaaaaattggggggtagatggagggggaaaaatagggtggtaaataggagggagagaaggttttatagaaagatggtggggaaaaagtttttgggtagatggaagggggtaagagagggtcgtgaggggggaacggggatgagtaggaaggagagaaggtttgtaaaaatatggtggggagagaagaaagggaaagaagattgtgggtaaaaagattttgagtgatggaggggggaaaagggtgataagtgggaggagaaaagagggtgtagagagggagggggaagagagagtggcgagtaggagggagagaaggttttgtgaaaagatagtgaggagagaagtttttgggtagatggaggggggaaagagggtggttagtgggagaagggtaaagagagtggcgagtcggaaagagaaaaggttttgttaaaagacgataggtagaaaagaaagtgtagaaagaaaagatagtggttaaaaagtgtttgggtagacggagggggaaaagagggtggtaagtgggaggagaatagaaagtgtggttagaggaagtggggaaagaggattgggaaaaaggcgatggggaaaatagtttggggtagatggagggtaaaaagagggtggtaagtaggatagaggaaagaagagggcgagcgggaagaggggaaggttttgtgaaaagatggtagggaaaaattggggaggtagatgggttaaaagagcgtggtgagtaggagtagagaagaggttttgtaaaaagacggtaggaaaatgttttttgggtagatggagaagggaaagggtggtaaggaggaagggaaaaaagacgatagggaaatagtttttgggtagacggaaggggaaagagagggtggcgagtagtaggagtggggagaaggttttgggaaaagatgagggaaatgtttttggggagatgaaggagtaaaagaggatgatgagagcgggaggcggaaaaaagggtggttagagagagggagaaaatacggtggggataagttttggggtagatgggtggggaaaacggaagtgagcggtatagtatagaaggttttgtaaaaagataatggggaaaaaatggtggggaaaaagttttggggtagatggaggaagaaaaagggtggcgagagagggagttaaagacggtcgggaaaaaaattttttttgttattgattttttaatatttttttatttcggttagaaaaaataattgatatgattttagggttttttttgttttggtttagtttggtttggttttttgagatggagtttcgtttcgttgtttaggttggagtgtagtggtgtgattttggtttattgttatttttatttttcgggtttaagttatttttttgttttagttttttgagtagttgggattataggtatgcgttacgacgtttagttaattttgtatttttagttttaaatggggtttttttatgttggttaggttggtttcgatttttgttgattgttttatttttgttttttaaagtgttgggattataggtgtgagttattgtatttggtaaggatgatgaattttattgaatgtttttatttgtatttattgagataattatatgatttttgttttaaattttgtttatgtggtaaattatatttattgatttgtatatgttaaatagtttttgtattttaggaataaaatttatgtaatgatgatgaattatatttttgatatgttgatggatttggtttgttagtattttgttgaggatatttgtatttatgtttattagatattggtttgtagtttgttgttgttgtttttttgttagattttagtgttaggatgatattggttttgtagaatgagttagagaggaattttttgattgatattatttattttttttatgtttggtagaatttagttgtgaatttatttagttttgggttttttttgtttgataaatatttttaatataaatttagttttataattaattattggtttgtttagatttttttaaatttatagagaaaaaatatttatttggtttatagttgtgtaggtagtagaagtatgggattagtatttgtttaggtttgggtgagattttagaaagtatttaattatagaggaaggtaaagggagggttagggtattacgtgttaagagagaaattaagagtaagaaggggaatatggtagggtgttttaaataattagttttcgtgcgatataatagagtaaggattcgttgatcgttaaggggatggagttaagtaatttatgaagggtttatttttatgatttaatattttttattaggtttattattaatatttaagattatatttaataggagatttggagggtaaatatatttaaataatgttattttatttttatggtttttaaattttatgttttttttatattgtataatataatgttattttatttttatggtttttaaattttatgttttttttatattgtataatataattatttttttttagtagtttttaaaaattttaagttgttttagtattaatttaaaagtttaaaattttatttgagttttaaggtatatttttttatttatgagtttatgagattaaaattaatttatttgtttttaatatttaatgtagtataggtgttgggtaaatatttttatttttaaatggagaagttgggtaaaagaaaggggtaataggttttaggtaaatttgaaatttagtagggtagatattaaatttttaagttttaaaataatttttgattttatgtttcgtatttagggtatatttgtgtaaggggtgggtttttaagattttatgtagttttgtttttgtggttttgtagtgtatagttattatggttgttgttttggattagagttgcgtgtttgtggtatttttaggtttaggatgaaagttttttatggttttattatttagggatttcgaggtggtagttttatttttatagttttagtatgtagtgttttagtggggattttggaggttttaattttatattttttgttggtattggttttagtggatttttggtttttttttgatttagttttggaaggtggtgtgtttgtaggaatgtatttattttttttaggttttttagtttttgtatataaagatattttgaggatttttttttatgtcggtggtattttttgtaatgttttatttgttatttttgattgtgtttatttgaattttttttttttttgtataatttaattagtaatttattatttgtatgtgtttttgtaaagaattaattttttaattttgttgattttttgtatggtttttttggttttgattttattattttattttttaatttttgttatttttttttattagttttgggtttggtttgtttttttttagtgtgtttggttattttagtttgttaatttgaggtttttttttttttttatgtaggtatttagtgttataaattttttttttaatattgttttttttgtattatagacgttttggtatgttatgtttttatttttatttgttttaggaatttttttaaatttttgttttagttttgttatttatataaaagttatttacgagtagattgtttagtttttatgtatttttgtggttttgcgagttttcgatattgatttttaattttattttatagtggtttgagaagatatttaatatagttgtgatttttaaaaaattattgaggtttattttatgattgagtatgtggttaattttagagaatgttttatgtgtaaatgagaaaaatgtacgttttatggtttttgggtggagtattttgtagatatttattaggtttgtttggttaagagtttaatttgagtttatagttttattgttagttttttgtttaataatttgtttaattaatttttttattgttgtcggtggggtgttgaagttttttacgattattgtatagttgtgtatttttttttttaggtttagtaatatttattttaaaaatttgggtgttttaatgttggttgtatatatatttaagatagttaagtttttttgttgaattgaatattttattattatataatgttattttttgtattttttttattgttgttagtttaatgtttgttttatttgatataagaatagtaatatttttttttttttgttttttatttatgtgatgaatttttttttatttatttattttgagtttgttggtattattatatatgagatgggttttttaaaggtagtagaagtgttttgtttttttatttagtttgttattttgtgttttttaagtggagtattttagttatttatatttaagtttaatattgatgtgttaggtttttttttttttatagtattagttagttattttgtagttttaattgtttaattgttttataggttttgtatatttt

SEQ ID NO: 463 - DNA, 7447 bp, Artificial Sequence
  chemically treated genomic DNA (Homo sapiens)
tatgaattaatttataagttaaaatttatagaattgtatgttaaataaagattaattttattgtatgttaaattgaaagtaaaaaaaaaaagttataggaatgaatgtatatttataaattgaaataattattttgaaggaaatgaatattttatgagagtttaagagagaggagggatattgttttgtgataaaggaaagtattaagaatgttttttttgaggaagtgaggtttgagttgggttttaaaaaatgatttagaatttatttgggttaaaggaaggttgatttatatagaagtatttgtatgtgtaaaggtttcggagtaggaggaagatggtttatttttatttaaaaaggattagagtatacggagtgttttggagggtgggagaagtgtatggggagtgagaaaaatttaagttggaataagagagttagattacgttagattgttttaggtggggtttaggttagggtgggtggagaggtgtagttgtgggttggtttgataattttattgatagttggaatattttgtagagattcgggtaattagattttttagggtaatgttggatttgggattggatttttagtagttttagtaggaggcggtttgtttttaaatttaaagattttagatattttgtagtgtcgtatttatcgtagattttaaagtgtttttttttgaggtttttgttttgtttaggagaatattgatagtttagtaatatatattaagttttttgaggggtttgagggttttgagagataagatagtttggtttgtatagattattatagggttttagtgatgtagttgtttttaaaaatatttgtgttaataattaggtattttttagatgggtaatagatttttattattttattttgaattattttatttttttttaggttttaagtttagggtttttttttatttttaggttttagggtttgttttatttagggttgggggtggaggttagagagtgatatagattaaatttataagttgttagttgattatttaatggaagtttatattgaataattttttgttaagtgaatagtttcggaatttgttttgtggtgtaataagggttgttaaatggtttagtttatatataatagtatgatatatagacggttgtagcgagatatgattttaggtattttatgggttaaatgtaggtagttattatgatttttattttagagatgaagaaattgaggttttggttagtgatttgaaaagttatatagttagaaaatggttaagatttggatttaggattgtttaattttaatatattggtttattgatttttaaatattagtatttgggtcgtgagatggaaatttattaaaaatgtagatttttcggttttatttgggttagggaattagtattttaaattttaaataaggggattttaggtgttttttttttttttaatttgaagaatttgggggattttgtaaatgatttgaagtttgagaggaagtgtaatattgtagggtttttaggagggggtattttgttgacgtttgtgattaggtttaattttttggggttttgcggtttagtgttgtatattgttatttgttttgaggtgcgtttggggtttagattggtcgatgaatacgtatattcgtagcgttttttttatttcgaagatttttatttttttttttgtataaaatcgaatattttattttattattatttttaagttaaaatatttgggtcgtttttttttacgaagggacgcgttttaggcgaatggggagggttcggaagtcgggtttgggatagaggagtcggtttatcgtttttcggtcggaagcggtagtgtaggtgaggcggcggttagtttggggattgcgcgggtaaggagcgggagggcggaatgtatcgcgaagttggcgggggacggttacgtacgtttcgtttcggtttttttgtatcgtagggtcgttttttcgttatttttgggtatttgtcgattacgtttgggcgagggcgggtcggttttcgttttcgggtttttatcgcggcggggacgtcgggttagcgaagggttaagggattcgtttttttttttcggtttttttatttttggaaagttttcgaaatgacgttttaattcgataatttaaaaaagagtttaattatagagataggttttgggagttggaataaatttttggtcggcggggtcggtaaataattcgggagcgagcgggttaggttagtcgtagttttgcggagttcgcgttttcggggagagggggaggggagggttttcgggagttggaaaagtcgaggaaattcgaggaattagttttttttggaaaaatttattttgtagttattttggggcgtttgatggtgtttttggtcggtttcgtagttttggagggaaagcggcgtcgttcgaagtaggggtatagtcggtgtttcgcggggataggttttgggtcgggaagggggtttcgttcgtttttagttttttttttttttgtttttttttagtttttttttcggtttttttagttgagtttcgcgaattttcgggagttaaagattagtcggttttttttttggggggggtggggggtgggggagcgggaatgggtggaggtcgggggaataaaaaatcgaaatagttttatattagaatttagattaattttgtggttttaacgcgtattttgttttgttttgaaatttggaatttattattttattattaagaaattgtacgaaattttttttttatcgttttaatatttatttgggaaaggaacgagtaaatatttttttaagaaagaaatttatatttgaatgatttaaattaaggtggatggaagttatttttttttttggcgtttgttagattttaagaaaagttgaaaaatgggagcgggggagggaagtaatagacggttggagggtagtagtagaataagcgaggggtagtagtcgagttaaagtgggggttatttatttcgggtagaggagataaatgaaagtcgatttcgttgggattacgtaggttcgtggttgtagtaaaagttgggttttataaagttgaaaaatagtcggttttttaaataattgtgatttggaaggtttcgttgggtttgtttagatgtttacgaataaataagaaatgtagttttaaaaaaaagtgtgtgttgggggtggtgagaatgcgtttttttcggttcgtttcgttttttttaaagaaacgtgtttataatggggtgatttaattatatcgtaatggaatttaattttagttatttcgtagtatcgggttttataatagattcggcggtttcgagtgttgggaagaaacgtgcgagggtcgaggggggcggcggagttcgcgtggaaatcggaaagaagcgtagttttgcgattttcgtttgggttattacgttagtagtcgggttaaggcgtagggggcgggtgggggattcgttaattttttatttgggtgggcggtatttaaatttaatagtatatattttattatttttaagggagttatgttttattgcgggtttttcggtttcgtggtttttatgtttttttttttatttttcgttaaaacggcgtagcgtgataagttatatgttttatttcggtgggggcgagagagaagtaataataagttaaaagtgtcgtttttttttatttttttatttttatttttattaaagtaatttttttttattgttttagagttttgaggtgtgtgtggggaggatggaggaggagggagggttgtggcgtcgtttagaattcggagcgcgcgtggaaagtagtgagttgttcggtgggttttttttgggaggaaggggtatttaggaaggattagggtttttttgattaaaaagtttaaagattggatgcgtgaaaagaaacggtacgtttaggtttggtaaaataaataatcgtttcgggttgtggtttttttttgcggcgttttttattcgtttatattcggagagcgtcggttgtaaagcgagcgcgagtgtcgacgcgtgcggcgtattaaattgtgtcgcgttcgttttcgttagattatgtttttttggggaaaaagtttttttagtttttttagtagcgcgttttattttacgtttcgttggaaaaaaaatagtaatataaaattttaggtttgaatattttgtgcgttttaaatttttaatgttttcggtttgttcggtttgtcgaagggagtcgagtgtcgaagagaagtcgggaaaaggtaagttgtgtagatatttggggaagttttaaggagatcgttagtttaagatggaaatcgcggttcgggcgttaaggacgggttttagttttcgttggtaaaaagagaaagtcgagttcgtttttttgtttaataaaaaataataatatgataataagaatttcggagggagtggaatgagtgacgttatagtcgcgttttgaggttgataaaggagggggcgcgtttttttcgttttgcgttcgcgcggtttcggagagggggcgtttgaagcgtcgggtagggaagttagtcgatttgaaatttttttttttaaagaaaaaaaaaaaaaagttgtgcgcggtttatagtggggtttttttttttcgtttttttttttcgttttttttttttttttttttttttgaaagtttttttttttttttttgtttttttttttcgtttgatcgtatggttgatttaattttagtgttaattaattttttttttttttttttttttatttaaataagtttaaagtttttttttttttcggtttattaaatttgaattttataaattgggttttgcgcgttttagttcggagttagaaaggcgaggggcgtcgggaattggcgtgtgggattttagataggagaggatgcgtttttttcgtatcgggattttcgcgatatattagattttcgtttttggttcgcgcgaacgtataggatgattattattttcgtgtttgttattattttcgatttgagcgaagttttatgtaaggtaaaggggggcggagtatttgttttttaaaaagttttttttttttgttttaagaaagaatttttaaaagtttgggttttggaaggtaatggggaaagtggtgtagcgagatgatttttttttttttcggtattttttttaagtttgaaggaatttggtttcgttttttttattttttgagttttaatagttgttggcggggattatatgtgaatttggaggttagggttttgaggggcgaagtttgtttggtagggtagttcgggggtttcggggggagggttgggattgggataagttttgggcgattttgttttacgtaacgtgttgttggattttaggtttgttggtttgatcgggtttttagtttgcgttttaggtttgtttagcggtattatttattcgtggggttgggagtgggaggtttttcggggaagtgagtttcgggataatgtttttttttattttttggggggagttggggatatgcgaggaagaaaggttaagttgtgatttaaaaagatgttgtagaataagtttgtagtggggtttgagttcgttttagtttcgttgggttttttttcgcgatagtcgatcgtgtagtaaattttggggtgaaagaggtatttaggttgattcgtttatttgtgttgtcgaggtattgcggtttatcgattgcgggcggggttggggggggaggtggcgataaaatgttggtttgaattcgagagtttcgcgagtaaggatttaatggggggttttttaaaatatgttgtttgttagttagtgttgaaaaagtaagttttaaattcggaatgttttaggattgcggtttaaatgtatatagtaaaagtttatggatgttgttaaatttttttttaattttttttttttaatttgaaagggtgaagttgttgggttattttttaattgttgaagtgttttgtttttttttaatacgtcgggttatgttgttttgtttttttagtttgttgtttttgttggtgtagttgttaacgttttagggttgtagggttggggtgtagggacgtcgaggagttgaagagtagtatttaaaaagtttgaattttttagtttttttttttttttgtatatttttaaattttatttgttagttcggttgttagcgttttttaatatttttttttttttttttcgattttttcgttttttgatttatttttttttttggtttttttttttttttacgattttttaaatgaattttattgttgggaattagttttcgattgggtttttgtaattttttcggtggggtggttgtagttatagattttcggtttttttttgttgattttaagggattaatattagaatttgtataatgatatttatatgggttgggaattaatttttaggtttttgatttgtattatttttaaattttgggtataatttgggtaggtgattagggttttattggaatagaaatttgttattggtggttttgtttttatttttattatttttaattcgttattgattaggaggtgggtaggggggttggtgtttttttttttttttttatttgtagttttgcgttaaagattaaatattggagtttttatttaagtttgtttttgtagttaaaagattaattgtaaaggtatttttttagtgaagggggcggggtgggttagggttgagtggaaatggtgagagagattattgtagaaaatatttttttcgggaatttagggtaaagagttttatttttaggaattatatttttgttttttttaattttagattaggtttttaattttttttttataagaaaaagtaaaggtagtttgaaaatttgttgttaaaggaagggaatatttttgaaggaggaagttgagagttttaggttaggttttgaaggagggggtattaattaagtagagattgattggaaggggatttaacgtagtttatgatagatttttttttgaggtttatttgtttttgtcgcgggcggtggcgggggcggggtgcggtaatttagagaggtttgggttgtgtgagatattttgagttgaagaatttatttgattagtaaaaaagttgaattttaaagtggtagttttggggatagaggatatgggggttgtattgtaggagttagtatggagtagggtgtttgttatatagtttggattttgtggttttttacgtatggggttaaaataaatttaggtgaatggtttatgggagggagagagggaagggagtttgttagagtcgaggtagagatgagttttttgagaaagagcgggcgtttgtgattgtgtagggggttgtttatagtggatattttggtggatgttttttgtttttattatttttttttttttttttttagg

SEQ ID NO: 464 - DNA, 7447 bp, Artificial Sequence
  chemically treated genomic DNA (Homo sapiens)
tttggagagagaagagaaaggatggtaaggatagaggatatttattaggatgtttattatgggtagttttttatataattataaacgttcgtttttttttaaagaatttatttttatttcggttttagtaagttttttttttttttttttttttataggttatttatttgggtttattttggttttatgcgtaagaaattataagatttaaattgtgtgataagtattttgttttatgttgatttttgtaatgtaatttttatgttttttgtttttaaagttattattttaaagtttaatttttttattagttaaatagattttttaatttaaaatattttatataatttagatttttttagattatcgtatttcgttttcgttatcgttcgcgataaaaataggtaaattttagaaaggagtttattataggttacgttaggtttttttttaattagtttttgtttaattgatatttttttttttaagatttggtttaagatttttaatttttttttttagaagtgttttttttttttggtaataggtttttagattgtttttgtttttttttgtggggaggagattgggggtttggtttgaggttgggggagatagggatgtgatttttgaaaataaaattttttgttttaagttttcggaagagatattttttataataattttttttattatttttatttagttttagtttatttcgttttttttattgagaagatgtttttgtaattagttttttggttgtaagagtaagtttggataagagttttagtgtttaatttttaacgtaaagttgtagatggaaaggaaaaggaaagtattaatttttttatttattttttagttaatagcggattgggggtggtggggatgggggtagagttattaatggtaggtttttgttttaataggattttggttatttgtttaaattgtatttaagatttggaaatggtgtaggttagggatttaggagttagtttttagtttatgtgggtgttattgtgtaaattttaatgttggttttttaggattagtagggggggatcgggaatttgtaattgtaattattttatcgagaggattataggaatttagtcgagagttggtttttaataatgaggtttatttaaaaagtcgtgaggggggaggggggttaaagaaagaaatagattaaagagcgggagagtcgagaaaagaaggaagaaatgttggggagcgttggtagtcgggttggtaagtggagtttgggaatgtgtagggagggaaggaagttgaaaaatttaaattttttaaatgttattttttagtttttcggcgtttttgtattttaattttgtagttttggggcgttggtagttgtattaataggagtagtaagttgggaaaatagagtaatatgattcgacgtgttaagagaaggtaaaatattttagtaattaaaaagtagtttagtagttttatttttttaaattgggagggggaggttggaaagaaatttaataatatttatagatttttgttatgtatatttaaatcgtagttttggaatatttcgagtttaaaatttgtttttttaatattggttgataagtaatatgttttaaggagttttttattaaatttttattcgcgggattttcgagtttaagttagtattttgtcgttatttttttttttaatttcgttcgtaatcgatgagtcgtaatgtttcggtaatataggtaagcgggttaatttgaatgttttttttattttaaagtttgttgtacgatcggttatcgcgggaagaagtttaacggagttagggcggatttaagttttattgtaaatttgttttgtaatatttttttgaattataatttggtttttttttttcgtatatttttagttttttttaaagagtggaggaaaatattgtttcgagatttattttttcgagggattttttatttttaattttacgggtgggtaatgtcgttggatagatttagggcgtagattgggaattcgattagattagtaaatttgggatttagtagtacgttacgtaaaataggatcgtttaaaatttgttttaattttagtttttttttcgaagttttcgggttgttttgttaggtaaatttcgttttttaaaattttggtttttagatttatatgtaattttcgttagtaattgttgaaatttaaagggtgggaaggacggggttaaatttttttaaatttgggagaaatgtcggaggagaaaagaattatttcgttgtattattttttttattgttttttaagatttaaatttttgggggtttttttttaaggtaaaagaaaaagattttttgaaaagtaaatgtttcgtttttttttattttgtataaaatttcgtttaagtcgaagatggtggtagatacgagggtggtggttattttgtgcgttcgcgcgagttaggggcgaggatttggtgtgtcgcgaaggtttcggtgcggggaaggcgtatttttttttgtttggagttttatacgttagttttcggcgtttttcgtttttttgatttcgggttggggcgcgtaaagtttaatttataaagtttagatttggtgggtcggggggaggaggagttttaaatttatttaaatgaggaagaggaggaaaaagaagttgattgatattggagttgaattagttatgcggttaggcggggagggggggtagggggaggagaagaaatttttaaaaggaagaagggggaggggagacgagaaaagaaggcggaaaaaaaaaattttattgtgagtcgcgtataatttttttttttttttttttaagaggaaaagttttaagtcggttgatttttttattcggcgttttaggcgtttttttttcggggtcgcgcgggcgtagagcgggaggggcgcgtttttttttttgttagttttagagcgcggttgtgacgttatttattttatttttttcggggtttttgttgttatgttgttgttttttgttgggtaggaaggcgggttcgattttttttttttgttagcgggagttgaagttcgtttttagcgttcgggtcgcggtttttattttgagttggcggtttttttgaaatttttttaagtgtttgtataatttattttttttcgattttttttcgatattcggtttttttcggtaaatcgggtaggtcgaggatattagaaatttgggacgtatagaatgtttaagtttaggattttatgttgttgttttttttttagcggggcgtagggtggggcgcgttgttggggggattagggaaattttttttttaggaggatatggtttggcgggggcgagcgcggtataatttagtgcgtcgtacgcgtcgatattcgcgttcgttttgtagtcggcgtttttcgggtgtgggcgggtggggggcgtcgtaaaaaaagattataattcgggacgattgtttgttttattaggtttaggcgtgtcgtttttttttacgtatttaatttttaaattttttagttaagaaaattttaattttttttgaatgttttttttttttagaaaaagtttatcgagtaatttattattttttacgcgcgtttcgaattttgggcggcgttataattttttttttttttttattttttttatatatattttaagattttagaataatgaaaaaaggttattttggtaagaatgaaggtaaagaggtggagggaggcggtatttttaatttattgttgtttttttttcgtttttatcggagtggaatatatggtttgttacgttgcgtcgttttggcgggaggtggagagggggatatgggagttacgaaatcgaagggttcgtaatggagtatgatttttttgaaaatgataaaatatatattgttaggtttggatgtcgtttatttaaataaaaagttaacgagttttttattcgttttttgcgttttggttcgattgttggcgtgatgatttaggcggaagtcgtagggttgcgttttttttcgatttttacgcgggtttcgtcgtttttttcggttttcgtacgtttttttttagtattcgaggtcgtcgagtttgttatgaaattcggtgttgcggagtggttaagattgagttttattgcgatgtaattaggttattttattatgagtacgtttttttggaaaggacggggcgggtcgaagagagcgtatttttattatttttaatatatatttttttttaaaattgtattttttatttattcgtaaatatttgggtaaatttagcgaaattttttaaattataattgtttgagaaatcggttgttttttaattttgtgaaatttaatttttgttgtagttacgaatttacgtgattttagcggggtcggtttttatttgttttttttgttcgaaatggatggtttttattttaattcggttgttgtttttcgtttgttttgttgttgttttttagtcgtttgttgtttttttttttcgtttttattttttagttttttttgaaatttggtaagcgttagaaagggaaataatttttatttattttaatttaaattatttaagtgtaggttttttttttagagggatgtttgttcgttttttttttaagtgggtgttggggcggtgggggagagatttcgtgtagttttttggtgatgaggtaatgagttttagattttaggatagagtagagtgcgcgttgaaattataaggttagtttgagttttgatgtgaagttatttcggttttttattttttcggtttttatttattttcgtttttttattttttattttttttaaaaaagaggtcggttggtttttaattttcgagggttcgcgaagtttagttggggggatcggaggaggggttggaaaaaagtaaaggggaaggggattgggagcgggcggggtttttttttcggtttagggtttgttttcgcggggtatcggttatgtttttgtttcgggcggcgtcgttttttttttaaggttgcgggatcggttaggagtattattaggcgttttagaatggttataaagtggatttttttaaagaaagttgatttttcgaattttttcggtttttttaattttcggaggttttttttttttttttttttcgggggcgcgggtttcgtaaggttgcgattggtttagttcgttcgttttcgagttgtttatcggtttcgtcgattaagggtttgttttagtttttagagtttgtttttataattaaatttttttttaaattgtcgggttgaaacgttatttcggggattttttaagggtgagggagtcgagaggagggagcgagttttttaatttttcgttgattcggcgttttcgtcgcggtgagggttcgagggcgggagtcgattcgttttcgtttagacgtggtcgataggtgtttaggggtggcgggagggcggttttacggtgtaggaaggtcgaggcgaggcgtgcgtggtcgtttttcgttaatttcgcggtgtatttcgttttttcgttttttattcgcgtagtttttaggttggtcgtcgttttatttgtattgtcgttttcgatcgggaggcggtgggtcggtttttttgttttaggttcgattttcgggttttttttattcgtttggagcgcgttttttcgtggggaggggcggtttaggtattttagtttggaggtggtggtggggtgggatgttcggttttgtgtaagggggaaagtgaaagttttcggagtgaaggaggcgttgcgggtgtacgtatttatcggttaatttggattttaggcgtattttaaggtagatgatagtgtgtagtattgggtcgtaggattttagaaggttaggtttagttataggcgttagtagggtatttttttttgagagttttgtagtgttgtatttttttttaggttttaggttatttgtaaaattttttaaattttttaggttgaaagagagagagatatttggagtttttttgtttaaagtttggaatgttgattttttggtttagatggggtcggggaatttgtatttttggtaaatttttattttacgatttaaatattaatgtttgagaattagtgagttagtatattgaagttaggtaattttggatttaaattttggttattttttagttatgtgattttttaagttattgattaaggttttaatttttttatttttgaaataggaattatgataattgtttatatttggtttataaagtgtttagagttatgtttcgttgtaatcgtttatatgttatgttgttgtatgtaaattaagttatttggtaatttttattatattataaaataaatttcggggttatttatttggtaaaggattatttagtgtagatttttattaaatggttaattgataatttataagtttgatttgtgttattttttagtttttatttttagttttggataagataggttttgaggtttggaaatggggagaggttttgggtttggagtttgggggagagtaaagtggtttagggtagggtgatggggatttgttgtttatttgaaaaatatttgattattgatataagtatttttgaaaataattatattattggggttttgtggtagtttgtataagttagattattttattttttaaagtttttaagttttttagaaagtttagtgtgtattattgagttgttaatatttttttgaataaggtagaggttttaggagagggtattttagggtttacggtaaatgcggtattgtagggtgtttggaatttttgggtttgggagtaggtcgttttttgttaggattattgagaatttaattttaggtttagtattgttttggggggtttgattgttcgggtttttgtaagatgttttaattgttagtgaagttattaggttagtttatagttatatttttttatttattttaatttaggttttatttagagtagtttggcgtaatttgatttttttattttagtttgggttttttttattttttatgtattttttttattttttagggtatttcgtgtgttttagttttttttagatgagaatgagttattttttttttatttcggggtttttgtatatgtaaatgtttttgtgtgaattaatttttttttagtttaagtaaattttaaattattttttagaatttaatttaagttttatttttttagggaaaatatttttgatgtttttttttgttataaaatagtgtttttttttttttttaggtttttatggaatgtttattttttttaaagtagttattttagtttgtgagtatatatttatttttgtaattttttttttttatttttaatttaatatatagtaaaattgatttttatttggtatatagttttatgaattttaatttatgaattgatttatg

SEQ ID NO: 465 - DNA, 4045 bp, Artificial Sequence
  chemically treated genomic DNA (Homo sapiens)
tttttttaaaaaaaaaaaaaaaaagtgtaacggggttaaattaaaagttaatagagtagggttttgttttcgtgtttttgtatgtttttattaattataattaaaagtaagattttagtcgggtacggtggttttcgtttgtaattttagtattttaggaggttaaggcgggtagattatttgaggttaggagtttaagattagtttggttaatttgataatatttcgtgtttattgaaaaatatagaaattagttagatttgtaattttattaagttatttgggaggttaaggtatgaggatcgtttgaatttgcgtggtggaggttgtagtgagttgagatcgggttattgtattttattttgggtaatagagtgagattttgttttaaaaataataggtcgggcgtggtggtttacgtttgtaattttagtattttgggaggtcgaggcgggcggattatttgagtttagttgtttaagattagtttggttaatatgtcgaaatttcgtttttattaaaaatataaaaattagttgggtatggtggcgtatgttcgtaattttagttatttaggaggttgaggtaggagaatggcgtgaatttaggaggcggagtttgtagtgagttgagagcgcgttattgtattttagtttgggtgatagtgtaagattttgttttaaaaaatataataaaaaataaaagtaagtaagatttttatttacgggataattttaaattgaggttgattagttttgtgggttttgtttgtttgtttgtttgtttgttttttaagtagagttttgtttttgttgtttaggttggagtataatggtatgatttggatttattgtagtttttattttttgggtttaagtgattttgttgttttagttttttaagtagttgagattatagggttattacgtttagttaatttttgtattttagtggaacggagttttatcgtgttggttaggtggttttgaatttttgattttaggtgatttattagtttaggttttttaaagtgttgggattataggcgtgagttatcgtgttttttttattagtttttttttttttttttaaattattaattagttttattattttggattttttggaaagtttttttaaaattattagtgtgtttagtttttcgcggatttttttttaaataggaatttttttgtttttttaaatttaaaattagaatagttattagttaagtttgttataaatgaataaaattattagagttattttggttttgttaattttaaaataaaaatttatttatataaaatttgtgtatattattcgtttttgggattattatttgttggatgtattatggtagaaatatattatttttttgattgttttatttattgttttaaaggataaaaaggaaaaaagaaaatatatttttttttttaaagttttttgttgttttttgagataaggtttttgttatttggtttattgtagttttcgtttgttaggtttaagcgattttcgtgttttagttttttaagtagttgggattttattataggtgtgtattattatgttcggttaaattttgttttttgtattttttttttttgttggttttggtttttgagacggagtttggttttgtcgttgaggttggagtgtagtggtataattttggtttattgtaattttcgttttttgggtttaagtagttttttgttttagttttttaagtagttggaattataggcgttcgttattacgtttggttaatttttgtatttttagtagagatagggttttattattttggttaggttgattttgaatttttgattttatgatttatttttttcggttttttaaagtgttgggattataggtatgagttattgtattcggtttaaattttgtatttttagtagagatggggtttcgttatgttgtttaggttggtttttaatttttgattttaagagatcgttcgtattggttttttaaagtgttgcgattataggtttgagttattagtatttagtttataaagtttaatagttgaaatttgtaagggtataaaggtgtttttttttggaagtgtgaagtttaagttaaaagtttatttaaatttataaggattttcggttgttattataagtagaagaaaattaatgaattgttttgtttaaattgtgtgatattttagtgagttgtaatgtaattaagtataatgaattattgatttttagagatgttagagatttagagaatttatggggaggaaattgaagagaagagattattattgacgagtagtgttaatttattagtttttttttatttaatttttggattgttttgaattaataattttaaatgtttgatattggttttattgtgtttttgagatagtttaaagttgtgtttattttagtttggttcgtgatttggtttaagtgtagttgtattattaattttttaatataaaagatgataatttttttaaaggggtttttttaaaagggaaataaagtttttttgttgtgtttgttaatttaattttgtttgtttgttttagattgacgtgagtgaatttagatataatttaagtttgttagagggttttttaaaaataaaaagttgatttcgtgtaagagagtaagttattgttgtttatcgtttagagatttataggtgtttgtttgtattgtaataaaggatttatttattgagtaagatttatatttatttttttattttggagagtttaataaattgttattatagtttttttattgatttttaaaagttttgaagtttgaaagatttttgtaattaaaatagtatgagtacggttagaatagagaattttgttataatgggtttgtttagttaaaatggttagttgagaggttttgtgaaatttattggtggttttggaggagggggtatatagatatagtaatagatgaattagttgaaaaatattaatataattaataatggtatttagtagtaagtatagagtatgattattattattaagtaagtgttagagtaaattattaataaatatttgtggggaattaagatttgtgttattttggtgttgattattaatatttatgttttaatttaattattttgattttaaatagaggatagatgattttgttttatggttagtaggtatttgtaatagaataatatatttttgttataatttgtttagtaagtagttattttgaggttagatgatatatataaattttgtataaatggtttttggaaatatttttggtttttataattagtgtaaaagttattagtttagtttgttgtaaatgaataaaattattagttatttcgtttttgttagtatagtttttttacgattgtattttattttagttaaatagtagataaagttaattttatgtattaaatttaaagatttagtttgagtttttagagtttttaaagatttgtttagttttttgaattttaagtattatttatttagaaaattttttcgtaattttttttagtttatggaatttagtttttttattttaaaaaaaaaaaaaagttggttggttgaggtgatttatgtttgtaatttttgtattttggggaggttaatgtgggaggattatttgagtttaggagtttgagattagtttaggtaatataatgagattttgtttttattttaaaaaaaaatttttaattttttttttttttttatatataaaaagggaattaagaattttgaatttatagaatatagttttgaatagttttagaaattttttgttaattttaaaattgaagagtttttttttattagaggatatttttttttttaaagttgaaagtatgtaggttatttgttatttttaagtgtatagtttaaattataatatttgaatggtaattattattttaaagatttagttataggaaattaatatttaagatttttgattttagttgatgtttggtttttgttaagaatttgttatatagggtcgggtgtagtggt

SEQ ID NO: 466 - DNA, 4045 bp, Artificial Sequence
  chemically treated genomic DNA (Homo sapiens)
gttattgtattcggttttatatggtaagtttttaataaaagttaaatattaattggagttaagaattttaaatgttaattttttataattgaatttttaaagtgatggttattatttaaatattgtaatttaaattatgtatttaaaagtaataaatagtttatatatttttagttttaaaagaaaaaatattttttagtaagaggaggttttttaattttaaggttaataaaaggtttttgagattgtttagaattgtgttttgtgagtttaaaatttttagttttttttttatatgtaaaaggaggaaaaaaattaaaaatttttttttggggtagagatagagttttattatgttgtttaggttggttttaaatttttggatttaagtgatttttttatattggtttttttaaagtatagggattataggtatgagttattttaattagttaatttttttttttttttaaagtaaaaaagttaagttttataagttaaaaaaagttacgagaaaattttttgagtgaataatgtttggagtttagaaggttgggtaagtttttaaagattttaaagatttagattgagtttttaaatttaatatataaagttggttttatttgttgtttaattagggtaaggtgtagtcgtaaaaaaattatattgataaaaacgagatgattaataattttatttatttataataaattaagttaataatttttatattaattatgaaagttagaaatgtttttaaaaattatttatataaaatttgtgtgtattatttgattttaggatgattatttgttgaataaattatggtagaaatatattattttattgtaaatatttattggttataaaataaagttatttgttttttatttggaattaaaatggttaaattaaggtataagtattaatagttaatattaaagtaatataaattttggttttttataagtgtttattaataatttattttaatatttatttaatagtggtggttatattttgtgtttgttgttgagtgttattattgattgtgttggtgttttttagttggtttatttgttgttgtgtttgtgtgtttttttttttagggttattagtgggttttatagggttttttagttgattattttgattggatagatttattataatagggttttttgttttggtcgtgtttatgttgttttaattgtaaaggttttttaaattttaaaatttttgaaagttagtagagaaattgtaataatagtttattaggttttttaaaatgaagagataaatataagttttgtttaataaatgagttttttattgtaatgtaggtaagtatttgtaagtttttgaacggtaagtagtagtaatttgtttttttgtacggaattaattttttatttttaaaaagttttttaataagtttgagttatatttgaatttatttacgttaatttgaaataaataaataaaattaaattagtaaatataatagaaaaattttgttttttttttaaaagaatttttttaaaagaattattattttttatattaaagaattaataatatagttatatttagattaaattacgagttaagttaggatagatataattttgaattattttaaaaatataatgaggttaatattaaatatttaaaattgttaatttaaagtaatttagagattaagtagaaagagattagtaaattagtattattcgttaatgataattttttttttttagttttttttttatgaattttttaagtttttgatatttttaaaagttagtgatttattatatttaattgtattataatttattgaagtattatataatttaaataagataatttattaatttttttttatttgtaatagtaatcgagagtttttatagatttaagtgagtttttgatttgaattttatatttttagaaaaaaatatttttgtgtttttataaattttaattattaaattttatgggttgggtgttggtggtttaggtttgtaatcgtagtattttgagaggttaatgcgggcgattttttgaggttaggagttagagattagtttggataatatagcgaaattttatttttattaaaaatataaaatttaggtcgggtgtagtggtttatgtttgtaattttagtattttaggaggtcgaggaaggtggattatgaggttaggagtttaggattagtttggttaagatggtgaaattttgtttttattaaaaatataaaaattagttaggcgtggtggcgagcgtttgtaattttagttatttggggggttgaggtagagaattgtttgaatttaggaggcggaggttgtagtgagttaagattgtgttattgtattttagttttagcgatagagttagatttcgttttaaaaattaaaattaataagaaaaaaaaatataaaaaataaaatttagtcgggtatggtggtgtatatttgtaatggagttttagttatttgggaggttgaagtacgagaatcgtttgaatttggtagacggaggttgtagtgagttaggtgatagagattttgttttaaaaaataataaaaaattttaagaagaaaaatgtattttttttttttttttttgttttttaaaataataaatgaagtagttaagagaatagtgtatttttgttataatgtatttagtaagtaatgattttaaggacggatgatatatataaattttgtataaatgaatttttattttgaaattgataaaattaagatgattttaataattttatttatttataataaatttagttaataattattttaattttaaatttaaaaaaataggaaaatttttgtttaaaaaaaaattcgcggaagattaaatatattagtaattttaagaaaattttttaagaaatttagagtagtaaagttaattaatagtttaaaaaaaaaaaaaagaattggtaggaggggtacggtagtttacgtttgtaattttaatattttgggaggtttagattggtggattatttgaggttaggagtttaagattatttgattaatacggtgaaatttcgttttattaaaatataaaaattaattgggcgtggtggttttgtaattttagttatttaggaggttgaggtagtagaattatttgaatttaggaggtggaggttgtagtgagtttagattatgttattgtattttagtttgggtaataagagtaaaattttgtttaaaaaataaataaataaataaataaataaaatttataaaattagttaattttagtttaaaattatttcgtaaatggaaattttatttatttttattttttattgtattttttgagatagaattttgtattgttatttaggttggagtgtaatggcgcgtttttagtttattgtaagtttcgttttttgggtttacgttatttttttgttttagttttttgagtagttgggattacgggtatgcgttattatgtttagttaatttttgtatttttagtaaagacggggtttcgatatgttggttaggttggttttgaataattgagtttaggtgattcgttcgtttcggttttttaaagtgttgggattatagacgtaagttattacgttcggtttattatttttgagatagagttttattttgttgtttagagtggagtgtagtagttcgattttagtttattgtaatttttattacgtaggtttaagcgatttttatgttttagttttttaagtagtttggtgggattataggtttggttaatttttgtattttttagtagatacggggtgttattaagttggttaggttggttttggatttttaattttaaatgatttgttcgttttagttttttaaagtgttaggattataggcgagagttatcgtgttcggttgaaattttatttttaattgtagttaataaaaatatataaagatacgaaaataaagttttattttgttggtttttgatttaatttcgttatattttttttttttttttttgggaggg

SEQ ID NO: 467 - DNA, 11812 bp, Artificial Sequence
  chemically treated genomic DNA (Homo sapiens)
tgtaagttttttttagagaatgttgttttttttttttttgtattttttggatttagaatagtgtttagtatgttgtaagtatttagtttaaattgaataaattaataattattatttataagattgaaagtttttgtggttacggattaatatttattgattatatatttttagtaatatttagtttagtattttgtatgtggtaaaagtttagaatgtttgttaaatagaattgtattttatttttttttgttttttaaagatgttttttgtttttttttggaaagtttttatattgttatttgtttttttattttttatgttttattttatttttgtttttttttttgtttatattttattataattttttgggattttaggaaattttaaattataattgttattttttaatttttagaggttatatagattatgttttataatttagtagtttatattaatatgtattttttgttttatgggtatttatttttgtttttttaataatattgtaaatggtataatggtagagattatataatatttttatattattgaaaatatataaggtgatatgtattgtaagtaatcgataattatattaatttatttagaatagtatttttatttgtttattagatatgattatttagatatttaatagagattttattttgtttgaaatagaattttttgtttaagtatttatgtatatttttttgttattttattttatatattggttattagaagggatttagttttttaagtttaaagtgtaggaataaattttttaattttgaaatagaagatttatatgtagttgtaagattaatttgtaagtataggggagattttatttgttttttatttaatttattttaatggtaatattttgtaaaattataatatagtttagtatatttttaaattattaaatagagatgtaatttagtaattttatttttatatatatatttgagtaaattgaaaatatatgtttataaaaatatttgtgtacgaatgtttatagtagtattattattattattattattattattattattattttgagatagagtttcgttttgttatttaggttggagtgtagtggtgcgattttagtttattgtaatttttatttttcgggtttaagtgatttttttgttttagttttttaagtagttgggattataggcgtatgttattacgtttggttaatttttgtatttttagtagagatggggttttgttatgttggttaggttggttttgaatttttgaatttaagtgatatttttattttagttttttaaagtgttgggattattatagtaatattatttttaatagttaaaagatggaaattatataaatttttatttatagatgaatgcgtaaataataagtggtttataattataatggagtattatataaatataatggttataaaaaggaatgaagtattaatatttgttataatttggatgaattttgaaattattatgtaaagtgaaaaaagtgggatattaaaggttatatattatacgattttatttatataagtattttgaatagggaaatttgtatcgataggaagtggttgtttagggttggagtgaggggaatggaaggataggggagttatttttaattaaagggtataaggtttttttttgaagtgatgaaaatgttttataattgattgtggtgatgattgtatttatttgtgtatgtttgtggaattgtatattttaaatgggtggattgtttggtatataaattttattttaataaagttgttgaaaataaaatataaattatagtataatagtataattaggataatgatatagttaagattttgagtattttattattataaaaatttttgttattgttttttatagttatttttattttttttttatttttatattttttttaatttttggtagttattaatttagtttttatttttataattttgttatgtaaaaatattatgtaaataaaataatttaatatgtaatatttgggaattaattttttttttttgaaatggagttttattttgttgtttaggttggagtatagtggtgagattttagtttattgtaatttttatttttttggtttaagtaatttttttgttttagttttttgagtatttgggattataggtgtacgttagtatgttttgttaatttttttgtatttttagtatagacggggttttattatgttggttagattggattcgattttttgattttaggtaatttatttgttttagttttttaaagtgttgggattttaggtatgagttatcgcgttcggttgggaagtaatttttatttatttagcgtaattttttggaaatttattaaggttgttgtgtgtatagttagtttttttttttttagttgagtagtatttttagaaattattttgatttttatttttttttatttattatatttaatttaggagtaagttttgttggttttattattaaagtttattttagattttattttttttcgttatttgtatgaatatatttgtttatattattattagttttcgtttagtttgagaatattaaattgattttgttgtttttatttttgtttttttataatttatttattatataatagttagaatatattttaattaaaaatttttatattaggttaggtgtagtggtttatatttgtaattttagtattttgggaggttgaagcgagcggattatgaggttaggagattaagattattttggttaatatggtgaaatttcgtttgtattaaaaatataaaaattagttgggtacgtgtttgtagttttagttatttaggagtttaaggtagaagaatcgcgtgaattcggtaggtagaggttgtagtgacgcgagatcgtattattgtattttagtttggtaacggagagagatttcgttttaaaataaataaataaataaattttatattattttttaaaggtttattttttttttttatttatatatatatttaaaaatatttattgagtgttaattatatattgggtattgtttagattttcgagaagtagttattatatttaaaataatgataaaatttttgattttgtggaattaatataatagttagggaagattaaaagtaaataaaataagtaaaatattgtaaaataaaaaaaataaagtaggaaagtaagatgagaagtttttgtaggtaggttagttatatttttaaatagattggttagggaaggttttattgagtagatgatatttgagtaaaatatgaaggagatagggaaagagttatgtagataattgggagaagaatatttcgggtagaggtaatagtaaatataataggataagatgaaagtaggatgggagtagttgaggaattgaagggaaatttgtgtggttggagttaagtgagtaagaggggaatatttaggagatgaggttagagaggtaatgggtttagatgatttattggtttgttaggttatttataatatttattatattttttattttaaatgagatagtaagttttggagatttttaagtataatttgatttttaaaattttattttggttgttttatgaagaataaagtataggaggaagaggggaagtaaggtgattagtgacgaggtgatttttaaaattaaagtaggagatagtggtggtgtgtattagagttgaaatttcggaggtggtgtgaattgattgggtttgaatatgtcgtaaagattagagttaaaaggttttttggtagattttatgtatagtgtaagagaaaaagttaatgatgattttaaggttttgagtttggggaattgtatagatggagtggttatttatcgaggtgaagagtgtagttggagtaggtttggtaagttatatggggaaatttggtttgggataagtttacgttgaaatgttgggtatatttgagtttgggattaatagttagttttgcggttataatttgggagttgttaatgtgtagattgtatgtaaaggacgttattatttagggtattggtttagatggagaagaggtttaagatttttggggttttttaaaatgaaaaggtttaaaagatgagaagtaattagtaaaggatattgtagagtatttagaaaaaaattttatattttttattataattatgatttgatttttgttaaattttttaattttattttttagtatatataggttatttaatttttgaaacgtatatattaagtttttttttgttttatggttattgtttttgttgtacgttttaataattatgtttttattttggttttagttttaattattttttttttttattatagtttttagttaatttgttattttattagatttttttttaatttttttaatttttatttgagttttttttaattattttaattaaataggtttaatttaattatttttattaaattatggtttttattatatttgaaatttgttttatttattttttgtttaaaaatttatttttattttaataatcgtttataaaatgattagcgtatgttaaatgaaaaagtttagatatttttttttgtatgtaattttttggaaagtaggggtttttttatgttgttttttgtcgtattttaatgtagttatattgttttagtaattaattttgagtttttaatagttattaacggaatagattgtaagttattgattggtaatcgaaggttagtattagaaagaggatatcgataaatttataaatagagggatttgttttcgttattcgcgttttaacgtaaagggtgggataattcgcgcgtatgcgtcgttgttttttgttttttagggtaaatttcgtttttttttttaggttagttttattatagtatatgcgtagtataggatttgtttgttcgtttgtcggcgttattaataaagttttagtgagtatagatttttttttttttggtaagatggcggagtacgatttgattattcgtatcgcgtattttttggatcggtatttagttttttcgttttttgaatttttttttgtaaaggaggtgagggggtttttgggcgtaaggaaggcgtgggggcggatgaggtgttgagtaaggtcgaaaggtggtgtttgtagttttaggtttgatacgtgcgaggcggtcgcgagtttggtttttggacggatattaaggattttttggtagtttagcgtcgttttagttaagaagtatcgtattattcggtagtgaggaggagggaggttacggagagagaaaagaagttttttttatttattgaggtgttagtgcgggagggattttcgtattattttttttcggaagttggcgattcgttggtttcgttagagaacgttagagttttataggttggtttgtaaaagtaatttggagtgttgttagagtttttgattttttttttgggaattgtgggaagtttgggtttggttgtgggtttttgtatgtcgagttttttggagtgatttttttatatttaaaataagtatttagcgttttaatttttatgaagttgtgagttttttgcgtttttttgttttggttaagtaggattttttagaatagtatatttcgttagatggggacggcgttttttcgtttttttttttagaaaaaatttttttaatttttaaatgtgttttttagtggatatattgtattgattttatgtggtttgaattggtcgttaatatttaattatttatttaagatattatgaataaatgtgtaattttggaattttattttaaagtatatgttagttttaaaagttttattggatttgaaagttttggttaaaagaaaattgatattagttatatcgtgagtttattgggaaattgatgtattttaataatgtaaagtaatttgtagtgatgaaggaattcgaatttttttagaaaaataagtgagttttgtttttggaagtagattataatataagtttatttagggaattttagatttggggagtggattttgtgtagtaaaagataaaaagtaataaaataaaaacgttttaaaaattagcgtttaggtgttgtggttcgttagataggtataatttttatatttatatgtattttttttaaatatagataattttaaagttgttgacgttaggtaacggttaagattatttttagtaaatgtttaagaatgttttgttatgtaaaatttttttttgatatatttttgttttgatttttttttttatatttgtattttagattttgagtaaaatattcgtatttgtattgtttttttttttggaaaagtgaggataaaagatttagtaaaaatgttatattttgaaagtttttattagttgtttgtagaagtatttttgaattagttgaattttatatatttttgtgttttttataattttattttttttatggtatatagaaggaaaggaggaatatgtaaatgtgaattagatttttatagggttagacgaaaattatgaattgtaggtagttgagaattagtgggaaaaattgtttaatatttatttttttggagaaaatgttggtaagatagttgtaatatattaagaggaagatagatgttggagtatttaattagtaattgttaagtatatttgatttttggatagtataggggttaggaacgttgagttttcgtagttaaaaattcgttataagttttgatttttttaaaatttaatatattttaatgttgataggaaggtttattgagaatatggatagttttgtgttgtatgtgttttatattgtattattataataaagtaagttagagaaaataaaatggttttaaattataaggaagagaaaatatatttattttttagtaagtggaagtatattattatgaaggtttttattgtttttatattgagtaggttgaggaggaggagtaaaaggaggggttggttttgttgttttaggggtagtagaggtggaagaagtagaggaagtggatgggaagttaggaaaggtaggtatatttggtgtaatttttattgaaaaaaagttgtgtatacgtggatttgtgtggtttaaatttttgtcgtttaagggttaattgtatagggttatataattgagaaatttaagataaaatttagatattttattattaaataatttatttattttttagagttgaatgtttttgatataaggtaaaaataaatgtcgaagaggtaggtattggtagagtgttattaaaattgagattttgttatttttagtgagtaaagaggattttgaggaggtgaggttttgagttttgaaggtaaaatggttagaatagagttagtgattttgttatgtgaggatatagtagttttttttttttatatttttttagtagttttaatttttgtagttttagttatttatggtttaaaaatattaaatggaaaattttagaaattagtaattcgtaagttttaaattgttcgtttttttgggtagtaggatgaaatttgtttcgtttttttgtttaaaattgggatatgaattatttttttgtttaatgtatttatattgtatatgttaatttaattgttttattttgttattgtttattttttgtttttagtttataaattaaattttattataggtatgtatgtataggaaaaaaatagtaaatataggattggggttatttgtagttttaggtagtagtcgttggggggttttggaatatttagtttatggataaggggagattattatattgtattaagagaaaaatagttttatatatttgtagtatattggagaatataagttttatgagagtagaagtttttttgtgtttttagtatataatatgagtttggtataaaggttttttatgattgtttaataaatgattgaatgaatatatatttgttttttatttttttttatttttatgtgaagtagaaggttagatagtgaaatatttaggattttgggttttgaattggattttttatgattcggttatttaatatttttgtgtagttagagtagatttttttatttttttaatttttttttatgaataaaatgttaatattattattaattttatcgggttagaaaaattatatgagataatgtatataaaatattacgtttttttgggatagagtgagtattttttaatgttttgtgttttgagatagggtttcgttttgttatttaagttggagtgtagtggtataattttagtttattatagttttgattttttgggtttaagtaatttttttattttagttttagaagtagttgggattataggtgtgcgttattatgttcggttgattttttttgtattttttgtagagatggggttttattatgttatttaggttggttttaaatttttgaatttaagtgatttgttattttggtttcgtaaagtgttgggattatagatatgagttattatttttggttttaaatgttttttattttggaagattagtttattttgtattggtatgggatgggaggggggggtagtgagggttttgaggagtaaggtaaggattggaaatggttattaagaaattgattaaaggaaagtataaggattggttaagtgtggagggtttaattgagattggaaattatattttagagttaataatggggttatttttagggcgaggagcggtagaaggttatgggagtagtatagatatatttaggggtaggtttgtatgtaaatgttatttagagaagtatagatgtgatcgaataatattattttttaattttgaaatattttgtagttatttttagttagaatttagagaataggtgattttttttttagagttagtgattgatattgaattgtatatagttggagaaattagtttgaaagaattaatgatagaattgaagagaaaatttttgaaatagttaaaaatgatatttaaattaaggtagaaagtgatattaaaaagggtattataaaaattagaaagggtagaaagtttgagatgatgaagattttaatggtaatggtggaaggggttattagttttaagttggaatttttggagatgaggggttattagttttaagttggaatttttggagatgagatatatgatgaaaattgttataatttgaggaataaaggaattttagggtttaagtttttaaagagttattagtatggtattatatttgtgttgaatgatagtagaggaagagatagtaaaaaaagatttttaatttgttaaaaagtaatatgtttttaagaggttgatagacgacggattagtagattatagtttgggaattagatagtagtttgtttttgtgtggttttggggttaagaatagtttgtaatagaggaatatttgtaaatattagtaattatagaatattaattttatattttaattaagtgaaataattttttttgaaaaagtattttatttttattaatagatttgtattataaaaatttttattgttattatttttgttttaaaatttttaaaaaattgtggaaatttgattttcgttttttatgtgagtatttatatagtatttttaattgttgttttttgatataaagtttgaagtatttgttttttgtttatgaggtagaattgagaggtatatgtagatttgagaataggatagtaatatttgatggtagaggagtaaggttattgaatttattgtggagagagacgtggtaaattaaaagttattagtggagtggggagaggtagcgtgtttggaaaagaatgtttttatttaagattagtgtttttatagggtaaagtgatgagaagttaaggttttttaggtaaattttttattagatatgacgtttatttatataagtatataaatataaatgtattggttaatgatatatattttttttaaaatgaatagcgaatatatttatgtgattattatttagattaataaataaaatattatagatatttttttttttttttttttttttttttttttttttgagatagagttttgttttgtggtttaggttggagtgtagtggcgtaatttcggtttattgtaagttttattttttgggtttacgttatttttttgttttagtttttcgagtagttgggattataggcgtttattattacgttcggttaattttttgtatttttagtagagatagggttttatcgtgttagttaggatggtttcgattttttgatttcgtgattcgtttgtttcggttttttaaagtgttgggattataggcgtgagttattgcgtttggcgatatttttaaatttttattttgatttttgttagttattatttatattttttaaaggtaagttgtagtttgatgatttattttgtttgtttttgatttttatataggtggagttaagtatttattattatgtattgttttgtatgatattttttatttagtattgtttgtgagttattatgtttttaggatagtagtagtagtttattgattttttagtgtcgaatgttaatttattatgagtatgttgtggtttgtttttttattttaatattgatagatttggttattataaatagtgtttttgtgtatatttttggaagtgtattttgattatatgtatttatttgttttggatgtttcgaaataattgttggattaaaaagtatgtttggttttgggagataaaaattttataaagtagttgtatttttgttagaagagaataggttttagttagtttatatttatattaatattggtattgttaggattttttaggtttttattgtaatttttagtatgtatttttttatgattaatgacgttgagaatttttttatgtgtttgttggttatttggttgtttttttttgcgaagtgtttattttttagttattttaattgtaaggtttgttttgttttatttatttataggagttttgtatgtaatttggaaggttcgattttgtttttatggttaaatattttttgattatttttatttttattttttgtgggtagtgaaatattgtggtatttttttggatttttttttttttgtaaaattaagtttagtatagaaatttttttttttgttgaagtatttttgttcgtgaatattttgtagaatttttatatattatttagtatattttatgttgttgtgagtttgtgtatatgtatttatttgttttttgtattataggttaaattatgtttttttggattttttgtaaagtaaaagtttgatttgatatggttgatttaaaaatttggtgtaggttgttttagtaatgtggatggagaagtatataggagtttattattgattatttggatgtggagaagtgatagttatatgtgttttataggaaagatggtgtgggttttatttatatatagttttgtttagaaagggtaagagatggtttgtagggatatataaaaaataaggttatgtaaattagaagtaggtgggaatgtttatagtaattttttttattttaaaatttttaggtaagtaaaatatttttacgtttataggttggttgtttgttatattgtttgttattattataagaggggaatgttaatggtttatcgtattttataaagtattttttgaaatatatttttaggtaaattagttttagtattaattagtttatttggggaatttaaatatatttattagaaagttatttttttttgtaga

SEQ ID NO: 468 - DNA, 11812 bp, Artificial Sequence
  chemically treated genomic DNA (Homo sapiens)
tttgtaaaagaagataattttttaatgaatatatttaagttttttaaataaattgattaatattaaaattaatttatttggaaatatattttaagaaatattttataaaatacgataaattattaatattttttttttgtaataatggtaagtaatatggtaagtaattaatttatagacgtaaaagtattttatttatttaaaaattttaaaatgaagagaattattgtagatatttttatttatttttgatttatatgattttattttttatgtgtttttataaattattttttattttttttaggtaaggttgtgtataaataaaatttatattattttttttgtaaagtatatatagttgttatttttttatatttaggtaattagtaataaatttttatatgtttttttatttatattgttgaaataatttgtattaagtttttaagttaattatgttagattaggtttttgttttgtaaaggatttaaaaaagtataatttaatttatagtatagggagtaaatagatatatatatataaatttataataatatgaagtgtattgagtaatatgtaaagattttataaaatatttacggatagaaatgttttagtaaaagaaaagatttttgtattgaatttaattttgtaaggaaagaaaaatttaagaaaatgttataatattttattgtttataaaaaataaagatgaaggtggttaaagggtatttagttatgagagtaaaatcgaattttttaaattatatgtagaatttttataaatgagtaagataagatagattttgtaattgaaatggttaaaagataggtatttcgtaaaagaagataattaaatggttaatagatatatgaaaaggtttttaacgttattaattataaggaaatgtatattaaaaattataataaaaatttaaaaaattttgataatattagtgttggtgtggatgtagattaattggaatttatttttttttggtaggaatataattattttgtaagatttttattttttaaagttaaatatattttttgatttagtaattgtttcgaggtatttaaaataaatgggtgtatatagttaaagtgtatttttaaaaatgtatataggagtattatttgtaatagttaagtttattaatgttaaaatgagaaaataaattatagtatatttataatagattaatattcggtattgaaaaattaatgaattattattgttattttaaaaatatgatgatttataaataatgttgagtgaaagatgttatataaagtagtatatggtggtaaatgtttaattttatttatataaaaattaaaaataggtaaaatgaattattagattatagtttatttttagggggtgtgagtagtgattaataggggttaagatgaaggtttaaggatgtcgttaggcgtagtggtttacgtttgtaattttagtattttgggaggtcgaggtaggcggattacgaggttaggagatcgagattattttggttaatacggtgaaattttgtttttattaaaaatataaaaaattagtcgggcgtggtggtgggcgtttgtagttttagttattcgggaggttgaggtaggagaatgacgtgaatttaggaggtggaatttgtagtgagtcgagattgcgttattgtattttagtttgggttatagagtaagattttgttttaaaaaaaaagaaaaaaaaaaaaaaaaaaaaaaggatgtttgtaatgttttatttattaatttgagtggtggttatataaatgtattcgttatttattttgaaaaaaatatgtattattgattagtatatttatatttgtgtatttgtatgaatgaacgttatatttgataaaaaatttatttaaaaaattttaattttttattattttgttttatagaaatattaattttaaataaaaatatttttttttaagtacgttatttttttttattttattagtaatttttaatttgttacgtttttttttataatagatttaatagttttgtttttttattattaggtgttattgttttgtttttaaatttatatatgttttttaattttgttttataagtagaaagtaaatattttagattttgtattaagaagtaataattgaaaatattatataagtatttatatgaaaaacgagaattaaatttttataattttttaaaaattttgaaatagaaataataatagtaaaagtttttgtaatataggtttattaataagaatagaatgtttttttaagagaaattattttatttaattggggtataaagttaatattttataattgttaatgtttgtaaatgtttttttgttataaattatttttagttttaaaattatataaaaataggttgttatttgatttttaggttatagtttgttgattcgtcgtttattaattttttgaaaatatattattttttaatagattaagaatttttttttgttgtttttttttttgttgttatttaatataaatataatgttatattgatgattttttaaaagtttgagttttaaaatttttttattttttaaattatgataatttttattatgtattttatttttaagaattttaatttaaaattgataattttttatttttaagaattttaatttaaaattgataattttttttattattattattaaaatttttattattttagattttttgttttttttaatttttgtaatattttttttgatgttattttttgttttagtttggatattatttttagttattttaaagattttttttttagttttattattgatttttttaaattaatttttttaattatatataatttagtgttaattattaattttggaaaaaaagttatttattttttaggttttggttaaggatgattataaaatgttttaaaattagggaataatgttattcgattatatttgtgtttttttaaatggtatttatatataagtttatttttaaatatgtttatattatttttatagttttttatcgtttttcgttttgagaatgattttattattagttttaaggtatgatttttaattttagttgggttttttatatttaattaatttttgtatttttttttgattagttttttagtaattatttttagtttttattttattttttaaaatttttattgttttttttttttattttatattaatatagaatgggttagttttttaaaataaaaaatatttagagttaagggtggtggtttatgtttgtaattttagtattttgcgaggttaaggtggtagattatttgagtttaggagtttgagattagtttgggtaatatggtgaaattttatttttataaaaaatataaaaaaaattagtcggatatggtggcgtatatttgtagttttagttatttttggggttgaggtgggagaattgtttgagtttagaaagttagggttgtaatgagttaagattgtgttattgtattttagtttaggtgataaagcgagattttgttttaaaatataaaatattaaggagtatttattttgttttagaagagcgtagtgttttatatgtattattttatgtaatttttttaattcgatgagattggtggtagtattaatattttatttatgagaaaaggttaagagggtaaaagaatttgttttgattgtatagaggtattaaatgatcgagttatgaaaggtttaatttagagtttagggttttaaatattttattatttggttttttgttttatatgaaaataaagaagagtgagaaataagtatgtatttatttaattatttattaaataattataaaaagtttttatgttagatttatattatgtgttgagagtataaggaagtttttgtttttatgaagtttatattttttaatgtattataaatatatgaaattgttttttttttggtgtaatgtaatagtttttttttatttatgagttaaatgttttaagattttttagcggttgttgtttgaaattgtagatagttttaattttatatttattgttttttttttatatatgtatatttatgataaagtttaatttataaattgggaataagagatgaataataataaaatagaataattaagttagtatatatagtgtggatatattggataaaaggatgatttatgttttagttttaagtaagagagcgagatagattttattttattatttagaagggcgaataatttaaaatttacgaattgttaatttttggaattttttatttaatatttttggattatgagtaattggaattgtagaaattgaaattgttaagggggtgtggggggggggggttgttgtatttttatatagtaggattattgattttattttaattattttgtttttaagatttaaagttttatttttttaaagttttttttgtttattgaagataataaaattttaattttgatagtattttattagtatttattttttcgatatttatttttattttatattaaaaatatttaattttaaaggataggtaagttgtttagtggtgagatgtttgggttttattttggattttttagttatatggttttatataattaatttttggacgataagggtttgaattatataggtttacgtatatataatttttttttaataaaagttatattaagtgtgtttgttttttttgattttttatttattttttttattttttttatttttgttatttttgaaatagtaagattaatttttttttttattttttttttttagtttatttaatatgaagataatgaagatttttatgatgatgtatttttatttattaaaaagtaaatgtatttttttttttttataatttaagattattttattttttttagtttattttattgtaataatatagtatagaatatatataatataggattgtttatgtttttagtaagtttttttgttagtattaggatatattaagttttgggggagttaaaatttataacggatttttgattgcgagagtttagcgtttttaatttttgtattgtttaagagttaaatgtatttagtaattgttaattaaatattttagtatttgttttttttttggtgtattatagttattttattaatattttttttaaagaggtgggtattgggtagttttttttattgatttttaattgtttgtagtttatagttttcgtttagttttatgaaaatttaatttatatttatatattttttttttttttttgtgtgttataaaaaaaatgaaattataaagaatataaaaatatataaagtttagttagtttagaagtatttttataagtagttggtaaaggtttttaaaatatagtatttttattagattttttgtttttatttttttagaaaagaaaataatgtagatgcgaatgttttatttaaggtttaaaatataggtgtaaaaagaagaattaaagtaaaaatatattaagagaaagttttatatgataagatatttttggatatttattgaaaatgattttagtcgttatttaacgttaataattttagagttgtttatgtttagaaaaggtgtatatgaatatgaggattatatttgtttaacgagttataatatttggacgttggtttttgggacgtttttgttttattgttttttgttttttgttatataaaatttattttttaaatttagagttttttaagtagatttatattgtagtttgtttttagaaatagaatttatttatttttttgaaaaaattcgaatttttttattattgtaaattattttgtattattaaaatgtattaattttttaataaatttacggtataattaatgttaatttttttttagttaaaatttttaagtttaataaaatttttaggattgatatatgttttaaaatgaagttttagaattatatatttatttatgatattttgagtagataattgaatattaacgattaatttaaattatatgaagttagtataatatatttattggaaaatatatttaaagattggagggattttttttgggggggggggcgggggagcgtcgtttttatttgacgaaatatgttgttttagaaagttttatttaattaagataagaaaacgtaaagaatttataattttatggaaattaaagcgttagatatttattttaagtgtaagagaattattttaaaagattcgatatgtaaaaatttatagttaagtttaggttttttatagtttttaaaagaaaaattaaaagttttaatagtattttaggttgtttttataagttagtttgtgaagttttaacgttttttagcgaaattagcgaatcgttaattttcgagaagaaatgatgcgaaaatttttttcgtattgatattttagtaagtgaaagagatttttttttttttttcgtaattttttttttttttattgtcgaatagtgcggtgttttttaattgagacgacgttaaattattagaagatttttagtgttcgtttaggaattaaattcgcgatcgtttcgtacgtgttaggtttaggattatagatattatttttcggttttgtttagtattttattcgtttttacgttttttttgcgtttaaagatttttttattttttttatagagagaaatttaagaagcggaaagattagatgtcgatttaaaaagtgcgcgatgcgagtagttaagtcgtatttcgttattttgttaaagaaaagggagtttgtgtttattaaaattttattggtagcgtcgataaacgaatagatagattttgtattgcgtatgtgttgtggtaaaattggtttaaagaaaggggcggggtttattttggagagtagaggataacgacgtatgcgcgcgggttgttttattttttgcgttagggcgcgagtgacggaaatagatttttttatttgtaggtttgtcggtattttttttttaatgttggttttcgattattagttagtggtttgtagtttatttcgttaataattattgaaagtttagaattgattgttgaggtaatgtgattgtattgggatgcggtaaaggataatatgaggaggtttttgttttttaggaagttatatatagggaagaatatttaggtttttttatttggtatacgttaattattttgtaagcgattgttaaagtgagggtgggtttttagatagaaaataagtgaaataaattttagatatagtaagagttataatttggtggagatggttgggttggatttatttaattaggatggttagagaaaatttagataggaattaaggaaattagagaaaagtttgatagagtaataagttagttgagagttgtggtaagagaaggaggtgattaaaattagagttagggtaaaaatatgattgttggaacgtatagtaaaaataatgattatgagataggaagggatttagtgtgtgcgttttaaaaattgaatggtttgtgtgtattggggagtaaggttaaagagtttgataagggttaggttatgattatggtaaggaatatggggtttttttttaagtattttgtagtgttttttgttagttattttttattttttaggtttttttattttgaagagttttagggattttggattttttttttatttagattaatgttttaaatggtaacgttttttgtatgtagtttgtatattgataatttttaaattatagtcgtaaaattgattattagttttagatttaaatgtatttagtattttaacgtgagtttgttttaaattaagtttttttatgtagtttattaaatttgttttagttgtattttttatttcggtgaatggttattttatttgtatagttttttagatttaaaattttagagttattattgatttttttttttatattgtgtatgaaatttattaaaaaattttttaattttaatttttacggtatatttagatttaattagtttatattattttcgaagttttaattttagtgtatattattattattttttgttttgattttgggaattatttcgttattaattattttgtttttttttttttttttgtgttttattttttataaagtagttagagtgaagttttaaaagttaaattatgtttaaaggtttttaaggtttgttattttatttagagtaaaagatgtagtaggtattataagtgatttaataagttagtagattatttggatttattatttttttgattttattttttaaatgttttttttttgtttatttgattttaattatatagatttttttttagttttttagttatttttattttgtttttattttgttttgttatatttgttattatttttattcggaatgttttttttttagttatttgtatagttttttttttgttttttttatattttgtttaaatgttatttgtttaatgagattttttttgattagtttatttaaaaatgtaattaatttgtttataagaattttttattttgtttttttgttttattttttttgttttatagtattttatttattttatttatttttggttttttttgattattgtattaattttataagattagggattttgttattattttaaatataataattgtttttcgaaagtttaaataatgtttagtatatagttggtatttaataaatatttttgaatgtgtatatgagtaaaagaaggaggtaggtttttggagagtgatgtaaagtttatttatttatttattttgagacggaattttttttcgttgttaggttggagtgtagtggtgcgatttcgcgttattgtaatttttgtttgtcgggtttacgcgatttttttgttttagatttttgagtagttgggattataggtacgtgtttagttaatttttgtatttttagtatagacggggttttattatgttggttaggatagttttgattttttgattttatgattcgttcgttttaattttttaaagtgttaggattataggtgtgagttattgtatttggtttgatgtaaagatttttagttgaaatgtattttaattattgtgtggtaaatgaattgtgaaggggtaggaatgaaggtagtaggattagtttgatgtttttagattgggcgagggttaatggtggtatagataagtatatttatataagtagcgagaagagataagatttaagatggattttggtggtagaattaataagatttgtttttggattggatatgatggataaggaagagtaaaaattaaaatgatttttagaaatattatttagttaaaaaggaggggattagttatatatataataattttaatgaatttttagggaattacgttgagtgaataaaagttattttttagtcgggcgcggtggtttatgtttgaaattttagtattttgggaggttaaggtaggtggattgtttgaggttaggagatcgagtttagtttggttaatatggtgaaatttcgtttgtattaaaaatataaaaaaattaatagggtatgttggcgtgtatttgtaattttaggtatttaggaggttgaggtaggggaattgtttgagttagggaggtggaggttgtagtgagttgagattttattattgtattttagtttgggtaataaagtaagattttattttaaaaaaaaaaagttagtttttaaatgttatatattaaattattttatttatataatatttttatatgataaaattatggaaatggaaattagattagtaattgttaagggttaaggaggatgtgggggtgggagggaagtaagggtggttataaaaggtaatagtagggatttttgtggtaatggaatgtttaggattttaattatgttattattttagttgtgttattgtattgtaatttatgttttgtttttaatagttttattgagataaaatttatatattaaatagtttatttatttaaagtatatagttttatagatatatatagataagtgtagttattattatagttaattgtagaatatttttattattttaaaaagaagttttgtattttttagttaagggtaatttttttatttttttattttttttattttagttttaaataattattttttatcggtataggtttttttatttaagatgtttatatgaatggaatcgtataatatgtggtttttggtgttttattttttttattttatatgatgattttaagatttatttaagttgtagtaggtattagtattttatttttttttatggttattgtatttatataatattttattgtagttatagattatttattgtttacgtatttatttgtaaatggaaatttatatagtttttattttttggttattaaggataatgttattatagtaattttagtattttgggaggttgaggtgggggtattatttgaatttaggagtttaagattagtttggttaatatggtaaaattttatttttattaaaaatataaaaattagttaggcgtagtggtatgcgtttataattttagttatttgggaggttgaggtaggagaattatttgaattcgggaggtggaggttgtagtgagttgagatcgtattattgtattttagtttgggtgatagagcgagattttgttttaaaataataataataataataataataataatagtaatgttattataaatattcgtgtataagtatttttgtggatatgtgtttttaatttgtttaggtatatgtataggagtggaattgttgggttatatttttgtttaatagtttgaggatgtgttagattgtattatagttttgtaagatgttattattagggtgaattgggtagagagtaaataggattttttttgtgtttataagttgattttataattgtatgtgaattttttattttaaaattaagaagtttatttttgtattttgggtttaagaaattgagttttttttggtgattagtatatggggtagaatggtaaaggaatatgtatgggtatttaaataaggagttttgttttaggtaaaatgagatttttattaaatatttgagtggttatgtttagtaagtaaatggagatattattttggatgagttgatatagttatcgattgtttataatgtatgttattttgtatgtttttaatgatgtggaagtattatatgatttttattattatgttatttatagtattgttgggaaagtaaggatgaatgtttatgaagtagagaatatatgttagtataagttgttaaattgtggggtatagtttgtgtggtttttaagagttgagaaataatagttgtaatttgaagttttttgaaattttaggaagttgtaataaaatataaataggaaaagaggtagaagtgaggtagagtataggaagtaaggaagtaggtagtagtatgaaaattttttaaaaaggaatagagagtatttttgagaagtagagagaaataagatgtaattttatttgataaatattttgaatttttattatatgtaaggtattaagttaggtgttattgggaatatataattaataagtgttagttcgtggttataggagtttttagttttatagatgataattattaatttatttaatttaaattaaatgtttataatatgttaggtattattttaggtttagggaatatagaaggaaagaaaataatattttttaaagaaaatttata

SEQ ID NO: 469 - DNA, 14147 bp, Artificial Sequence
  chemically treated genomic DNA (Homo sapiens)
gggggtattgagtaatatatttagattaataatattttataagtgtgagtattattgatttaaatttttttgttggttgtgttttgtgtttatgtttgttttatatttattttttttagagttgttttttttagagttttagtaatttttatttttttaaatttttttagttatgggaaggattagtaggtgttagtggatttaaaagaattttagatttgttgagatttttgatttttggtgtttagattaattagtaaatagtttaattaaacggtttgtttttatggttaatataattttgaattggtggttatttagattaagtttattttgtttttgagacggaattttgtttttgtcgtttaggttggagtgtagtggtgcgattttggtttattgtaatttttgttttttgggtttaagggatttttttgttttagttttttaagtagttgggattataggtatttattattattttcgattaatttttgtatttttagtagagatagggttttgttatgttggttaggttggttttaaatttcgattttagatgatttgtttattttagtttttttaagtgttgggattgtaggtgtgagttatcgcgtttagttaaagtttagtttgtataagaaggttttttttgttatgttataggatttttgagtttattaaatagattttaatgttttgagattttacgtatttttttaaaatgaagtatttaaattgttagtgtttgtttttttgtttggtttttttgatgtattgatttggtttgttagtgtgatgaaaaatatggttgagttttattgttttattgtaattagtaggattgtttagaagtttaatttttttaagagatgaagatttgagtttatgtagttggttgttttttaaaaatatttggttatttgggatatattttgaattaattttttggttattttatgtgattaaaagtgttagttttttttgtttttagtatatttttttgtttgggaagtggaagggatgaaatttttatatttttttttgatgatatagaaaggagtatatatttatattttatgaatagatatgtaattatagaagaaatagtttaacggtcgggcgcggtggtttatatttgtaattttagtattttgggaggtcgaggtgggtggattacgaggttaggagtttaagattagtttgtttaagatagtgaaatttcgtttttattaaaaatataaaaaattagtcgggaacggtggtaggcgtttgtaattttagttatttaggaggttgaggtaggagaatcgtttgaattcggagggtggaggttgtagtgagtcgagattacgttattgtattttagtttgggcgatatagtgagattttattttaaaaaaaaaaaaaaaagtataattatatgattatttatattgttttatatattaaattagtagtaatttgttttttatatagtaaataaaaataaattagtagtaataaatatattttttttgtgttatagttagtatttggtgaattttgtattttttttttttttaaagtgttgaatttataggtttttataaggtaagtttatattattaattaattttgtttttttttttgatgttaaaattgttttttaggagttgattaggtttatttttttgttttttaagtattatttttagaatatttttgaaagtatttttgttttttggtaataatatttatattttatttattttttgtttttaaatatatatttagttaattttaggttttttttaatggagtagttatttatttatttaatatacgttgggtgttttttttgtgttatatattgttttggtttttggggatagagtaggaaataaaaaaaaataaaatttgtttttatatagttgatattttagttaggggagataaataataaataaatgaatgatgtagtatgttagatgttgatagtgttatggagaaagtatattatggagattagaagtattatttgtaatggaatagttatgattttaagaagaatggttgattggatgtgaagtgtgagagagaggagtttaggtttttggttgagtaattggagggatggagttgttattatttgagatggagaagttaggggaggagtagatttggaggggaaggttaggaatttagtttggaatttgttaagtatgaggtatttattaaatattgaagtggatttttagaagatgttattaaaattagttaagtttaggagagagttttgggttagaaataaaaatgtgggagatattggtatatatatgggtttatattatttttttttttaatttaatattttattttattgttttttgtttttttaatagtatttagttttatttattttttaaattgatttttatattgatagtataataaaatttatattttttattatattaagattttgtgtgatttaatttttttttattttttggattttgttttaggttattttttttttttatttaatttttaatattttgattttattgttttttaaatagttttttgttgttttttgttttttttgtggaaaaggtttttttattgtttaattattaggtatttttcgatttttttttattttttatttttgagaaaggttttttttgattttttatattaattaggatttttttgggcgagatttgatttaaattggtttagagaaaaggagttaattgattggtttatgtaatttaattttttttttttgttgtaatttttttttggtttttattttatttaaggttaaagttagggtttttattatggttttgtaggttttatatagtttgttttttttattatttttttgattttattttttatattttttttttatttatttttttttagttagagtggtttttttgttgtattttaaatatgttaggtatatttttattttagtgtttttgtgtttgttgttttttgtgtgtggaatatattttttatatagttatattatttaaaatttattgtttttaagtttttatttaaatgttttttcgtgaagttatttttgagttttttttaaaattgtagttttttatttttgtattttttattgttttttatttttaatttttgttattgtagttagaattatttgatatatagtttttattttattggttttttgttatgtttttttttataagaatttgaagtttattaggtcgggagttttgtttgttgtgtttgttgttattttttagtgtttaaaattgtttggtatatagtaggtatttaataatttttgaattagtgaaaattagatggtggtttggtatttttatataggaatgagttaggtggaaattatttaggatataagtagattttgaagtgataaggaagggttattataattatgtggggtttattttgtttttttttgttttttttttttaggtttagtaatagttttattaaggattttatgaatattaaagtttatatttatatgttgttagaggtgagagtagtttattttattattagattttgtgtttagggtggtgatttgaagaaggaagagagcgaaagaagggaaggattatttttttttttaaattggagttaagggagggaggttagagtaagtttgggggcgtaatttagatttagtttttgtttaattttttttgtttttttttttaggggtttagagaattataaggtttgtagaattttttagagaagttttattattgattttttttttttatttttagatattaaagagtttgaatgtttttgagttatatggtttttttttttttttataaattttgttagttgttacgggggtttgtttttagggtataaagttattgagagatttagagatttagtttttttgtggaatttttaaaatgttttagtagttttgtttttagtttgttgtttggtagtatttgttagttgattttatgtattgtttttttttttgttattttggtaatttgggttttttattttatttttttttttatttttttttttagacgttattttttgaattgttatagagaatgggttaatttatggtggaggtttgtttatttttataataattaaagggttttaaggtttacgtttttatatatttaattattttttaggtattttaaattatatttaaattttaatttagttttattttgttttagtttttgtttgtaagtgttttagtttttaatgggtatagatttggatttcgttttttttagtcgggtttttattttaggttgagtttagttatcgttaattaatgtagagttaggttttttttttttttaattttggtcgtagtttaattttgttttttgaaagtatttcgtttttgttatttaatgttttttcgtgtgtttgatagttattttgtttttttattttcgttgtgttttaaattcgtttttatttagttttatggttttgtttaatcgtagagttgttttgttcgtttacgcggagtttagttcgatttattttcgtcggttgttacgtttatttttatataagttttgttttcgttgagtagtatggcgtgcgatatcgtttttttggtgttttggtaggggtttagaagtttttcgttcgttaattagagaaaaatagggttatttattttcgtttttgggggttgttttttattaattttatgtaagttaattagtgtgaggtagattttcgttttttcgatataggtttcgagtttttttagttgtttatagttcgttagtttttgagttaatcggcgtggagtatcgtgaaggtcgaacgcgttttttcgggattttaggggtcgtgagcgttttattatttttttttacgttaattacggtatagttttgtagggaagggttcgttttttaatttttcgaggttttgcggtcgattaatagcgttttggttaattagcgagcggcgggatattgggtttttttttttcgggtttacgtgagttgtagggaaacgtaggggcggtttttaggtgttgtcgtcgttatcgttattattatttttatcgtcgtttcggaatttaggtttggggggcggtggggtcgcgtatggagttttcgtttttcggagttgttaatattgttaacgttatcgttacgttatatataggtgagttttgggtttggagggtggagggtttagttcgtgattttacgtatttttttcgttttcgcgtagaggatgtggtttggtcggtggtttgttggtgttcgatttttcgtcgttattattacggttggtggatttgcgtgtggtattgtttaagtttttcgttttttatagtggatttgatcgtggtttaatttttttttttcgttgtataatggatcggtttgcgtgtttatgtttttttttacgttaatttagggtggattcgtttataggttttttttttatttttatttttattcgttttttatttatttttatttatagggagttagtttgtgatagtgtttagtttttttaatagtaggtgtatttgagtgtttggattttttttagttttaatttttaggagattcgttcgtggttttatttattttattttttttgtatatcgtagcgaattaattcgtggcgtcgtattttttcgtatttttttttaatagtgagtttatttgagtttgtatttttgttttttttagttttttaatgtattagtttatggttttttttaaaattattttttttttttattattattattattattttatagtggattagtttttatgtttggatttacgtttttttagttattagtttattgttttgttttttttttttcgtagattgtcgttttagcgtttggggtttttttttttttaatagtgggttagtttagtgttttatatttttttatttttagtagtttagtttatagttttttttttttttgttttgaattagtttgtgtgatggtttttttttttttttattgtggtgtaggagtttgtaaggttttttgttttttttttttttagacgatgagttttattatttttttttttgtagtggatttgtttattggttttttttttttatatttttgtatgtttgtatagtttttcgtatattttttcgtgagtttagtgttttgtaattgggggaagatcggtcgtgtatttttaatttttttttttttttttttttttttttagaagagaacgtgttgatttttttttttttgtgatggagtattgtacggttttttttgttttttattttttaatagtgggttagtttggttatattcgtaattataaagacgttttgttttattataataagtgaatatattagcgttagtgatgatagtaatgttaataggagttagcgtttattgagtatttgtcgtatattaggtagagtgttttatatgaatgagtttttttaatttttattataattttatgagataggtagtgagggaattgggttatagggaggttaaattttttatttaaaggtggtttaggaagtatttaggatataggataatttttgaggttttttttttagattttattttattttacgtgaggttttagtttttaaaaattaaattagtttttatttttaagtttttgtttttgttgttttttttgtttgtagagtagtttttattttttatttttttttagtatttatttattttttaattttagtagttgtgtgattttagatgagtgatttaattattttttttttgtgtttttttttttatttgtgaaatgggggattagaattagaattttttttagtgtaaataaatattaattgtgaattaatggtaaaataagtaatttttttagtattatcgtttatatttttttatttttttattgtgttttaattatattggttttattatatagttttttaaatatagtaggtatgggttagttttagggtttttgtattggttgttttttgtgttttgaatattatttttagatttttgtatggttttttttagtattttgtttaaatattaatttttaaaggatgtttattatattgtggtgtgtggaatgtagtataaaaagatatatgtatgaaagatgtttttaagaatgttagtttatatatgagtaagggttttttttttttttaaaaggatgtgtttataagattgaggtacgtaatatgttttgtaaaggtataggtataaaagttgtttttaagagtgttagttgtatatgtgaataaggattgtgttgttgtattgaaagaatgtgtttataaaattgtggtgtgtagttgggtataggggtgtgtatttatagttttagttattcgggaggttgaggtgggaggatagtttgagtttaggagttttaggttagtttgggtaatatagcgagatttttttttttgaaaaaaaaaaatttaaaaaataattattgtggtgtgtgtaatatatttttttaaaggtataggcgtaaaagatgtttttaagagtgatttgattttgttgtatttgggtagtgttattttattaaaggttgattgttatattatggtatttagaatatattatataaaggtatatgtataaaaaagaagtttttaataatgttatttgtaaaaataaaaaaagttaatttttttttgattatttgaagttgtatatttagtagggtttaagttaggtttttgatttgtttcgttgttttttattattgtttgatatattgtgtgggttatttgtttgttgtttgtttttttttattagaatgtgagttttatgaggatttagtttttgtttgtttatttatcgttatgtttttagtaattgaaaatgtattaggtaaatagtagatgtttaataagaatttattttatgaataaatgggaaaaagataatttgagatattagtgtaggggttatatgaggaagaagaagggatatgagagttaattagttgggattgtttttgtaattaatttttattgagttttttgtgagtattaggtatttttttaggtgttggaatatggtaaggaacgaaatagggcgaaatatttgtgtttgtggagttgatatttattaaaagttggggaggttgggtacggtggttaatattagtaattttagtattttgggaggttgaggtgggtggattgtttgagtttaggagtttaagattagtttgggtattacggtgaaattttatttttattaaaatataaaaaaattagttgggtgtggcggcgtgcgtttgtaattttagttatttgggaggttgaggtaggagaattgtttgaatttaggaggcggaggttgtagtgagttaagattgtattatgtattttagtatgggtgatagagcgagattttgttttaaaaaaaaaaaaaaaaaaatttaagttggggagatagattatgtgaataaaataaataagtaaaattagtataatagataaatgttgagaagaaataatgaaatagggtaggtaggaatcgagtattgggggtggttgaaattttaggtatagggaaggtgatttttgaattagggttttacggtagagacggagagagttttaatgtttacgggaagagtatattaggtagaaggaagtgttagtttagaggttttgaggtgggatggtgtttgttatgtttaaggaatattaaggcggttagtgtggttggagtagagtgcggggaagggtagaaggtgaggttatataggtgatgggagttagatagtgtaggtgatatataggataggattgtaggggtagggggagaaggatgatatattagttaatagttaatatttgtggagtatttgttatatattagaggtatttttttgtttaaatattaatttttaaaggatgtttattatacggtggtgtttggaatgtattataaaaagatatatgtgttaaagatatttttaagaatgttagtttatatatgaataaggattttttttttttttaaaaggatatgtttataaaattgaggtatgtaatatgttttatggaggtataggtataaaagttgtttttaagagtgttagttgtatatgtgaataaggattgtgttgttgtattgaaagaatgtgtttataaaattgtggtgtatagttgggtatagaggttgaggtgggaggattatttgagtttaggagttttaggttagtttgtgtaatatagtgagattttcgttttcgaaaaaaaatttaaaaaataattattgtggtgtgtataatatatttttttaaaggtataggtataaaagatgtttttaagagtgatttgattttttggtatttgggtagtgttattttagtaaatatttattgttaaatattatggtgtttggaatatattatataaaggtatatgtataaaaaagaagtttttaataatgttatttgtaaaaataaaaaaaaaagttaattttttaagttttttatagaagtattttatagaattgatatagttaatttttatagaagttttggagggtaggtgtatttttgagaatatttgattttgagagtaaaatatttttattttatagatgaggaaataagtaaagagaggttgagtaatttgtttagggtaattttgagttagaatagttagaataggggtagaggaatataaggttgaagatttagaaagaagaatagatttgtaagggtaggtaggttatttggtatttttgattacgtagaggaagaatgaattttttttggaatgcgatgattgtgtaattgagtttatgaagtgagggaagagttttttttgcggggagagtagttcgtgtttatttttagaggttggaattgtttcgggaacggtagatagtttagggtggttgttttagagtttttgtatacgtcgttcgtttcgtttgaaggtttttttttatagagggtagtttggtttgttatttttttttttttaggttaggtgttatttttttggggaagaattttttgtatattttgtgtaaaaatagtatttttgttattttttaggattttatttttttttgtttttttttatggagaattggtggtgtaaggcgattgtttattagagttaaattatttaggttttgaatttcggttttgttaatttttagttgtgtgatttggggtaggttatttttttgtatttttattgttttatgtggaaaatgggggaaatgataatttttattttttaacggtggtttgaggatttaatgagttaaatgatttaaagagtgtgtagtttacggtaaggatcgtatgtttggtttgtatttttaaattattaaaatgtatttatagtatattcgtagatgtttgataggtttttgaaattgattatttttaaaattggtgtgattttttttaaaatttatttttttgtaaggtttttattttagttgattataatgttgtttttgtgggtgattaggttataaatttagatttattttggattttttttttatttttttcgggtatgttatttgttagtaagttttattttgtgtttaggttttttttagattttagttatttttcgttagttttattgttattattattatttatcgtagtggtttttttagttttaatagtttgttttttttataatcgttagggggattttgttgaaattttagttatagtttgttatttttttgtttataatttttttgtggtttttgttttatttaatattttgatagtattcgaaaaagtttggtttagtttggttttcgttattttgtttttttttttcgttgttttttttttttttttcgaatttatgttagttttttttttttatgttatttgttaggtattttttagttttgggttttttatatcggttgtcgtttttatttggtttgttgtttttagatatttacgagtttagtttttttatttttttttggtttttgtttagttgttttttttttggcgattatttttttttgattttttatgtaaaagtaatagtttttttttgtttgattttttttttataatttttattattatttgacgtatttttgtatatgtttgtttttttttttatttgttttttttgttaagatgtgagtttttttggagtagggattgttgtttgttgcgttttcgattgtattcgtagtatttggtttatagtatgtatttattaaatgtttgttaagtgaaggagatggaaagaagtaaatatatttaagtaaggtagattattagaatttttatgaggggttaagtgggagaaataataaaatataaagttttgtgtgttgttgaagttggaagtttatcgttattttttatttagttgataggttttgttgtagttgaaagaagaattggtaaaattgtttgtttttgttattaggagttattttgaattttttggatttttgaaataagtttgtttgtaaaataaatttagtgaggtttttggtgataggattttttaatcggatattttatggttttgtgatttgtataattgaataggaagtttatgtttatttttagtttgtttttaggaaagaaagtagtaatggggtgatagggaggattttgttttttgaaggatatgttgagagggaatagtcggtgtgaggggtcgtttagtttaatggtgaaatgtttagttaattggaatttgattgtttggttttaaatgttggttttgttatatgtggtttgtggaaggtacgtagatatttgtgttttcgttgttttatttataagttaatgataggaagattatttattttttagaggtatgattagggataaataagttaatgtttattaaaaaaaaaaataatagtataggtgtatatgtttttatttaaaatttttggggttagatgtgttttagaatttttatttttttatattttagaaaggtaatatgatgtatatacgatgttatataatattttttagtaagttttgtaatcggttgtgtttatatttttgtagtaaaatgtatgaatattcgtaataagtgagatttaataaagattagaaagggttttgttttattttaaattaggttttgttattaaaagagttaaaagaagttttttgtttttagagtattttggatgttggaatggtagataagggattatgaataaattagaaattaatatttagagtttattatatattttaggtatataatatttaatttgtataatatttttgtgaattaggtattgttatttttattttattaatgggtatattattatttttgttttatatatgagaaaattgaggtataaagaggttaaagaatattagttaagcgtggtgttttatgtttgtaattttagtattttaggaggttagggagagaggattgtttgagtttaggagtttaagaatagtttgggtaatatagtgagattttattttttaaaaaaagaaaaagaatatgtttagggttatatagttaataagtggtagaattaggatttaaatattggtaatttggttttagtgtttgggtagttgtttagtaggttatattgtttttttgtttagaagagtgtttgatgtgtattaagtttttaatagatgttaattattgttgttattaagaaagagaatatttagggtcgagtacggtattttatatttgtaattttagtattttgggaagttaaggtgggaggtgggtggattatttgaggttaggagtttaagattagtttggttaatatggtgaaattatgtttttattaaaaatataaaaattagtcgggcgtggtcgtgggtatttgtaattttagttatgcgggaggttgaggtatgagaatcgtttgaatttgggaggtagaggttgtagtgagttaagattgtgttattatattgcgttttagtttgggtaatagagagagattttattttaaaaaaaaagaaaaaaaaaaaaagaacgagaatatttagggatagtaataggatagagagattaggtatttatttagttttaggacggttttataaaggaaaggatttttgggttgggatttgaaagataagaaagattgttaggcgaaagaaggaagttttacgtggagtgagtagtttttgtaagggtttggtaaaaaaaaaattttttgaaaaatttgatattgatatggtagaagatatagataatatttaaatgaggaggatggaattagttttttatttttgttgtaataaataattataaatttagttgtttaaaataatatatttgttattttatagttttgtaggttagaagttttatattggttttagttgaaattaaggtattggtagggttgcgttttttttggaggttttaggggaaaatttattttttgtttatttaagttgttggtagaatttaattttttgagattgtaggattgaagtttttgtttttttattgtttgttagttgatagttatttttagttttaagaggttgtttatagtttttgattttgagttttttttttttatttttaaagttaataatggtaggttgagttttttttatattttgaattttttttgttttttttgttattatatttttgagttatttttttttttttattatttgttttttagagtttatatgattagattgaattttattaaataatttagaaataatttttttgttttagggtttgtaattttaattttatttgtaaagtttttttttgttatgtagtgtaaataatatataggtttcgaggattaggatgcggagtagggttggtattatttggtttattatagtttgttttttgatttttatagatttatatttgttttatatttaaaatatatttatattattttaagatatttatgagttgtattttattatagggagtattttaagtaagattggggagttagaagttagtttgggaaggtttagggaatgatggtagggtttgaagatagagatggagaaaagatgataaaaaaaggaatttttttttcgttgatttttgttttttttatgtttatagttttttaatttagttgtttgttttttagg

SEQ ID NO: 470 - DNA, 14147 bp, Artificial Sequence
  chemically treated genomic DNA (Homo sapiens)
tttggagagtaaatagttgagttgagaggttgtggatataggaggggtagaggttagcgggaggaggatttttttttttgttattttttttttatttttgtttttaaattttattattattttttaaatttttttagattaatttttagttttttagttttgtttgggatgttttttgtgatgggatataatttatgggtattttaggatggtgtgaatgtattttgaatgtgaaataaatgtgaatttgtgggggttagagggtagattgtggtaggttaaatgatgttaattttgtttcgtattttaattttcggaatttgtatgttatttatattatatagtagaaaggaattttgtagatgaaattaaggttataaattttaagatagggagattatttttggattatttgatgaaatttaatttaattatatgagttttgaaaagtagatgatggagaaagaaaggtagtttagagatgtgatgatagaagaggtaggggagatttaaaatgtgagagggatttaatttgttattgttggttttgaagatggaggaaggaggtttagaattaaggattgtgggtagttttttaaagttgggaatggttgttagttgatagatagtaaggaaatagggattttagttttataattttaaggaattggattttgttaataatttgaatgagtaggaaatggatttttttttagagtttttagaaggaacgtaattttgttaatattttgattttagttgagattagtgtgggatttttgatttatagaattgtaagataataaatgtgttgttttaagtagttaaatttgtgattatttgttatagtaagaatagaaaattagttttattttttttatttgaatattatttgtattttttattatattaatgttaagttttttaggaggttttttttttgttagatttttgtaaaggttgtttattttacgtggggtttttttttttcgtttagtagttttttttattttttaagttttagtttaaaggtttttttttttatgaagtcgttttaaaattgaatgaatgtttgatttttttgttttgttattgtttttgaatgttttcgttttttttttttttttttttttttttgagatggagtttttttttgttgtttaggttggagcgtagtatagtggtataattttgatttattgtaatttttgttttttaggtttaagcgatttttatgttttagtttttcgtatagttgggattataggtatttacgattacgttcggttaatttttgtatttttagtagagatatggttttattatgttggttagattggttttgaatttttgattttaagtgatttatttattttttattttggttttttaaagtgttaggattataggtgtgagatatcgtgttcggttttgaatatttttttttttgatgatagtaataattaatatttattgagagtttaatatatattaggtatttttttaagtagagaggtaatatggtttgttggataattgtttaggtattagggttagattgttagtgtttgaattttggttttgttatttattagttgtgtgattttgggtatattttttttttttttttaagaaatggggttttattatgttgtttaggttgtttttgaatttttgggtttaagtaattttttttttttggttttttaaagtgttaggattataggtatgaggtattacgtttggttgatattttttaatttttttgtattttaatttttttatgtgtaaaatagggataatgatatgtttattagtaaaatggggataataatatttagtttatagagatattgtatagattaaatattatatgtttgaggtgtatgataagttttaaatattagtttttgatttgtttatagttttttatttgttattttaatatttaaaatgttttaagggtagaaagttttttttaatttttttggtggtaaaatttgatttgaaatgaaataaggttttttttggtttttattgaattttatttattgcgagtgtttatatattttgttgtagaaatatgaatatagtcgattatagagtttattaaggggtgttatgtaatatcgtatatgtattatgttatttttttgaaatgtgaagaaatggaaattttgaaatatatttggttttaggggttttgggtaagggtatgtatatttgtattgttatttttttttttaatgggtattgatttatttatttttgattatgtttttgagaagtaggtagtttttttgttattaatttataaatgaggtagcggaggtataaatgtttacgtattttttataggttatatgtggtaaagttagtatttggagttaggtagttaggttttagttgattaagtattttattattaggttaaacggttttttatatcgattatttttttttagtatgttttttaaagaataggattttttttgttattttattattgtttttttttttgagagtaaattggaaataaatatgagttttttgtttaattatataagttataaagttatgaagtgttcgattagagagttttgttattagagattttattgaatttgttttgtaggtaggtttgttttagaagtttaaagagtttagagtgatttttggtggtaaagataggtaattttattagttttttttttagttgtaatagaatttattagttgagtgaaaggtgacggtgggtttttagttttaatagtatatagggttttgtattttgttattttttttatttgattttttataagagttttagtaatttgttttgtttagatatgtttatttttttttattttttttatttagtaagtatttggtgagtgtatattgtgggttaggtgttgcggatatagtcgagaacgtaatagataataatttttgttttagaggagtttatattttagtaggaaaggtagatgagaaaaaaggtaaatatgtataagagtgcgttagatggtggtaagggttatgggaaaaaaattaagtaggggagagttgttatttttatatggagagttaggggagagtagtcgttaaggaggggataattgggtagagattaaaaggaggtgaaggaattgagttcgtgagtatttgagagtagtaagttaggtggaagcggtagtcggtgtgaagggtttaaggttggagagtgtttggtaggtgatatggggagaggaggttgatatgggttcgggggagaggagggaggtagcgggagaggagaatagagtgacgggggttagattgagttaggttttttcgggtgttgttaggatgttgagtgagataggagttataagagggttgtgaatagagggatgataggttgtgattgagattttaataggatttttttggcggttgtgagaagaatagattgttggggttgaagaagttattgcggtagatgatggtggtagtagtggggttggcgagaagtagttggggtttggagaaagtttgaatatagaataggatttgttgatagatagtatgttcgggggaggtgagagaagggtttagggtgagtttaggtttgtggtttaattatttataaagatagtattgtggttagttgaggtgggagttttgtaggagagtaagttttgaggggggttatattagttttggagatggttagttttagaggtttgttagatatttacgggtatgttatgaatatattttaataatttaaaaatgtaagttaggtatacgatttttatcgtgggttgtatattttttgaattatttaatttattgaatttttaaattatcgttaaagggtggggattattattttttttattttttatatgaggtaatggaggtatagagaagtaatttgttttaagttatatagttggaagttggtagagtcggaatttaaaatttaagtggtttggttttagtgagtaatcgttttatattattagttttttatgaagagaaatagagaagggtaagattttagagagtgataggaatgttgtttttatatagggtgtataaggagtttttttttaaggaagtgatatttggtttgaaggaggggaggtagtaagttaggttgttttttgtgggggagggtttttaggcggagcgaacggcgtgtataaaggttttgaggtagttattttgaattatttatcgttttcgagatagttttaatttttgagggtaagtacgggttgtttttttcgtagggagagttttttttttattttatggatttaattatataattatcgtattttaggaagaatttattttttttttgcgtgattaaaggtgttaaataatttgtttgtttttgtaaatttgtttttttttttgagtttttagttttatgtttttttgtttttgttttggttattttggtttaaggttattttgagtaagttatttagtttttttttgtttgtttttttatttgtaaaatggggatattttatttttaaagttaaatatttttaaaagtatatttattttttaaggtttttgtgaggattaattgtgttaattttgtaaaatatttttgtaaaagatttgaggggttgatttttttttttgtttttataagtagtattgttaggaattttttttttatatatgtgtttttgtatagtatattttaagtattatagtgtttaataatgaatatttattgaaataatattatttaggtgttagaaaattaaattatttttagaaatattttttatgtttgtgtttttaggagagtgtattatgtatattatagtggttattttttgggttttttttcggagacggggattttattatgttgtataggttggtttggaatttttgggtttaagtgatttttttattttagtttttgtgtttagttatatattatagttttgtgaatatatttttttaatgtaataatatagtttttatttatatatataattagtatttttagaaatagtttttatatttgtgtttttatagagtatattatatattttagttttgtgaatatatttttttgaaaaggaggaaaatttttatttatatataaattggtatttttagaaatatttttgatatatgtatttttttgtagtgtattttaggtattatcgtgtggtaaatattttttgggggttggtatttgaatagaaaagtgtttttgatgtgtggtagatattttatagatattagttattagttagtgtgttatttttttttttttgtttttgtaattttattttatgtattatttgtattatttggtttttattatttgtgtgattttattttttattttttttcgtattttgttttagttatattggtcgttttgatgttttttgaatatggtaggtattattttattttagggtttttgaattggtatttttttttgtttggtatgtttttttcgtagatattaaggtttttttcgtttttatcgtgaggttttaatttaagagttattttttttatgtttaagattttaattatttttaatattcgatttttatttgttttattttattatttttttttagtatttgtttattatgttaattttatttatttattttgtttatatagtttgtttttttagtttgggtttttttttttttttttttgagatagagtttcgttttgttatttatgttggagtgtatggtgtaattttggtttattgtaattttcgttttttgggtttaagtaatttttttgttttagttttttaagtaattgggattataggcgtacgtcgttatatttagttaatttttttgtattttagtagagatggggttttatcgtgatgtttaggttggttttgaatttttgagtttaggtaatttatttattttagttttttaaagtgttaggattattggtgttagttatcgtgtttagtttttttaatttttaataaatgttagttttataagtataaatatttcgttttgtttcgttttttgttatattttagtatttagaagagtgtttggtatttataaggggtttagtaaaggttggttgtaggaatagttttaattaattagtttttatattttttttttttttttatgtgatttttatattggtgttttaaattattttttttttatttatttatgggataaatttttattgagtatttgttgtttatttggtatatttttagttgttggagatatagcggtgaatgagtagataaaaattgagtttttatgggatttatattttaatgaggagagatagataataaataagtaatttatatagtgtgttagatagtgataaagggtaacgggataaattagggatttggtttgagttttgttgggtgtgtagttttagatggttagggaggggttgattttttttgtttttataagtagtattgttaggaattttttttttatatatgtgtttttgtatagtatattttaagtattatggtgtgataattaatttttaatgaaataatattatttaggtataataaaattaaattatttttagaaatattttttacgtttgtgtttttaagagagtgtattatatatattatagtggttgttttttgggttttttttttttagaaaaagggatttcgttatattgtttaggttggtttggaatttttgggtttaagttatttttttattttagtttttcgagtagttgggattataagtgtatatttttgtgtttagttatatattatagttttgtgaatatatttttttaatgtaataatatagtttttatttatatatataattagtatttttagaaatagtttttatatttatgtttttatagagtatattacgtattttagttttgtgaatatatttttttgaaaaggaggaaaatttttatttatatataaattggtatttttagaaatattttttatatatgtatttttttatattgtattttatatattatagtgtggtaaatattttttgggggttggtatttgaatagagtgttgaaaggaattatgtagagatttgggggtggtgtttaaggtataaagaatagttaatgtaaaggttttgaggttggtttatgtttgttatgtttgaggagttgtgtggtggaattagtgtggttggagtatagtaagggggtgggaaggtataggcggtaatgttagaaaggttatttgttttattattaatttatagttaatatttatttatattggaagggattttagttttgattttttattttataaatgaagaaaaaggtatagagaggaagtggttaaattatttatttaaggttatatagttgttgggattggggggtgggtgggtgttgagagaaggtgaggaatgaagattgttttgtaggtagagggaatagtaagaataaaagtttggaggtgagaattaatttggtttttaaggattgaggttttacgtggggtgggatgagatttaagaggggagttttaaaaattattttgtgttttgagtattttttgggttatttttgagtaaggaatttaatttttttatggtttaatttttttattatttattttatggggttgtggtgaggattaaaggaatttatttatatgaaatattttgtttgatatacggtaggtgtttaataaacgttagtttttattggtattattattattattggcgttaatgtatttatttattgtagtgaggtagaacgtttttgtggttacgagtgtgattaggttgatttattattaagaggtggaggatagggaaggtcgtatagtgttttattataaggaaaagaggattagtacgtttttttttgggaagggaaaaaaaaagagaaggaaattgaaagtatacggtcgatttttttttaattataaagtattggatttacgggagggtatgcgggggattgtgtaagtatataggggtgtgggggaggaaggttaatgaatagatttattgtaaagggaggggtgatgaggtttatcgtttgaggggaaggggagtagaaaattttatagatttttgtattatagtgagaggagagaaaagttattatatagattgatttaaagtagagagggaaaaggttatggattgagttattgaaaatagggagatgtaaagtattaaattaatttattattaaaaaggagagaattttaagcgttagagcgatagtttacgaaaaagaggagatagggtaatggattgatagttaaagggacgtgaatttaaatatgaagattgatttattataaaatggtggtggtggtggtggggggggggggtggttttgaaaaaagttatggattgatgtattgggggattggaggaggtaggaatataaatttaggtagatttattgttaaagagggatgcggaggagtgcggcgttacggattgattcgttacgatgtataggaagggtggaataaataaggttacggacgggttttttgaaagttgaggttaggagaaatttaaatatttagatatatttattattaagggggttgaatattgttataggttagttttttataagtgggggtgggtggggggcgggtgggggtaggggtagggggaaagtttatggacgagtttattttaagttggcgtggggaaaaatataagtacgtagatcgatttattatataacgggagggggaggttaggttacggttagatttattataagggacgaagggtttgagtaatgttatacgtaggtttattagtcgtggtggtggcggcggggagtcgaatattagtaggttatcggttaagttatattttttgcgcgggggcgggaaggatacgtggggttacggattgggttttttattttttaggtttagagtttatttgtgtgtagcgtggcggtggcgttggtaatgttggtagtttcggggggcgggggttttatacgcggttttatcgttttttaggtttgggtttcgaggcggcggtggaggtggtggtggcggtggcggcggtagtatttagaagtcgtttttgcgtttttttatagtttacgtgggttcgaggaggaggagtttaatgtttcgtcgttcgttgattggttaaagcgttattaatcggtcgtaaggtttcgaggggttgggggacgggtttttttttatagagttgtgtcgtgattggcgtaaggggaaatgatggaacgtttacggtttttggagtttcgaggaggcgcgttcggtttttacggtgttttacgtcgattggtttaaggattgacggattgtgagtaattgaaaaggttcggggtttgtgtcgggggggcgggggtttgttttatattgattggtttatatgggattgatggaagatagtttttaaggacgggggtgggtggttttgtttttttttgattggcggacgagggatttttagatttttgttaaaatattaagggggcggtgtcgtacgttatgttgtttagcggaagtagggtttgtatagaaatgggcgtagtagtcggcgggagtgggtcggattgggtttcgcgtaggcgggtagggtagttttacggttagataagattatagagttgggtaaagacgaatttagaatatagcggaggtaggagggtaggatggttgttaggtatacgaaagagtattgagtggtagaaacgaaatgtttttagagggtagggttgaattgcggttagagttaaaaaggggaggaatttggttttgtattgattggcggtggttggatttaatttagaataggggttcgattagggagagcgggatttaggtttgtgtttattggaagttggaatatttataagtaggggttaagataaggtagggttgagttagggtttgggtgtaatttggggtatttggggaatgattgggtgtgtgaaagcgtaaattttagggttttttgattgttgtgggaatgaataaatttttattatgaattggtttattttttatggtaatttaaagggtggcgtttaggaaaaggaatggaagaaagggtgaggtggggggtttaggttgttaagatgatagaagagagggtagtgtataaggttaattggtaaatattgttaggtaataggttggaggtaggattgttggggtattttggaggttttatagagagattggatttttgggttttttagtaattttgtgttttaggaataggttttcgtggtaattagtagggtttatggggaaaaagaagggttatgtgatttaaaggtatttaggttttttaatgtttgaggatggggggaagaagttaatggtgaggtttttttgggaaattttgtaggttttgtagttttttaagtttttgaaaaagaggatagaagagattgaataaagattgggtttgggttacgtttttaggtttgttttgattttttttttttgattttagtttagagggaaagatggttttttttttttttcgtttttttttttttttaggttattattttaaatatagagtttggtagtggggtgagttgtttttatttttagtaatatgtggatatgggttttgatatttatggagtttttggtgaggttgttgttgagtttagagaaaagaaataagaaagggtaaaatgggttttatatgattatgatgatttttttttattattttaagatttatttatattttggatgatttttatttggtttatttttatgtggaaatgttaagttattatttggtttttattgatttaaagattattaaatgtttattgtatgttaggtaattttaggtattgggagatagtagtaaatataataaataaaattttcggtttgatggattttaaatttttgtaaagaaagatataataaaaaattaatggaataaaagttatgtgttagatggttttaattataataataaaaattaaaaatgagagataataaggagtataggagtggggggttgtaattttaaagagggtttagggatggttttacggagaagtatttgagtaaagatttaaagatagtgaattttgagtagtgtggttatatggaggatgtgttttatatataaggggtagtaaatataaaggtattgaggtgggagtgtgtttggtatgtttgaggtgtagtaaagaggttattttggttggagaagaataagtgaagggggaatgtaagaggtgaggttagagaggtaatgagggagataaattgtgtgaagtttataaggttatggtaaggattttggttttgattttaagtgagatgggagttaagggaaggttgtagtagaggaaggaggttgaattatatgaattagttagttgattttttttttttaagttagtttggattagatttcgtttaaaagaattttaattgatataaagggttaaggaaggttttttttaagaatgaagaatgagaaggaatcgaagaatgtttaatggttaagtagtaggaaggttttttttataaaaaggataagaggtaataaagagttgtttgagaagtagtgaggttagagtgttagaaattgagtggggagggaaagtggtttaagataaggtttaagagataggaagaggttagattatatagggttttaatataataaggaatgtggattttattgtgttgttaatgtaggagttagtttgaggggtaaatgaaattaaatattgttggaaaagtagagagtaataagataggatgttaaattggaaaaaaaagtagtatgaatttatgtatatattaatattttttatatttttatttttagtttagaatttttttttgaatttgattagttttaatgatattttttaaaaatttattttagtgtttaataagtgttttatatttaataggttttagattaaatttttgatttttttttttaaatttattttttttttaatttttttattttagataatggtaattttatttttttagttgtttagttaaaaatttgggttttttttttttatattttatatttagttagttattttttttaaaattatgattgttttattgtaggtaatgtttttgatttttatgatatgttttttttatagtattgttaatatttgatatattatattatttatttgtttattgtttgttttttttgattagaatgttagttgtatgagggtagattttgtttttttttgttttttgttttatttttagggattagaatagtgtgtggtatagaggaggtatttaacgtatgttgaatgaataagtgattattttattaaaaggaatttgaggttggttgagtgtatgtttagggataggaaataaatgaagtatgggtgttgttgttagagagtaagaatatttttaagaatattttgggggtaatgtttaaagaatagaagaatgaatttgattagtttttaagggataattttaatattaaaaaagagaataaaattagttaatggtgtaagtttattttatgaaaatttatgagtttaatattttaaaagggagaaaaatatagagtttattaaatgttagttgtaatataaaagggatatgtttattattgttgatttatttttatttgttatgtgagaagtaaattattattgatttagtatgtaaggtagtgtgaatagttatatggttatgtttttttttttttttttgagatggagttttattgtgtcgtttaggttggagtgtagtggcgtgatttcggtttattgtaatttttatttttcgagtttaagcgatttttttgttttagttttttaagtagttgggattataggcgtttgttatcgttttcggttaattttttgtatttttagtagagacggggttttattattttggataggttggttttgaatttttgatttcgtgatttatttatttcggttttttaaagtgttgggattataggtgtgagttatcgcgttcggtcgttaggttgttttttttataattatatgtttatttatgagatgtggatgtgtatttttttttgtgttattaggaaagaatatagagattttattttttttattttttaaataaagaaatatattaagaataggaagaattgatatttttgattatataaaatgattagaaagttagtttaaagtatattttaagtaattaaatatttttaaaggatagttagttatatagatttaaatttttattttttagaaaaattaaatttttagatagttttattaattataataaagtagtaagatttaattatattttttattatattaatagattaggttagtatattaaaaagattaggtaagggggtaggtattgataatttaaatattttattttggggaagtacgtggagttttaaaatattaaaatttatttgataggtttaggaattttgtgatataataaggaaagtttttttatataaattagattttagttgggcgcggtagtttatatttgtaattttagtatttagggaggttgaggtgggtagattatttgaggtcggagtttgagattagtttggttaatatggtaaaattttgtttttattaaaaatataaaaattagtcgggagtggtggtgggtgtttgtagttttagttatttgggaggttgaggtaggagaattttttaagtttaggaggtagaggttgtagtgagttaagatcgtattattgtattttagtttgggcgataagagtaaaatttcgttttaaaaataaagtggatttggtttaaatgattattagtttagaattgtgttgattatgaaagtaggtcgtttaattaaattatttgttaattggtttgaatattaagaattagaaattttagtaggtttgaggtttttttgggtttattagtatttgttagttttttttatggttggaaaggtttgaaaagataaaaattattgaaattttaagggaggtaattttggaaaaaatgaatgtagaatagatataaatataaaatataattaataaagaagtttaaattaatggtatttatatttgtgagatgttgttaatttaagtgtattgtttagtgttttt

SEQ ID NO: 471 - DNA, 38342 bp, Artificial Sequence
  chemically treated genomic DNA (Homo sapiens)
ataatattaaatgttttttggatataaaagaggttgaagatttaggaatgattaataggagattattgatgatagtttaaagatagtagttttagtaaaggaataggagtagaagtaatatttttaggattaagaagagttataaagtggatgtattgagggttggttattttttttgagaaagtggaataaaggaattaggtgattatatgttaatgaatttaaaggaataagaaagtaatattgtttatattttgattattattaatattttaaaatgtttatttaaagtatttgggagattgattagtatgttaagaaaaatattgtgtgaagtgaaaatagaaaaagaaattatatgtaagttgttagaatatgaaaatagtatatgttggtaggaatttaaagtgaggtaaaaatataatgtaatcgaagaaaataaattcggatttattttaatatgttaatgagattatatttggaataatgtatttaatgtgggatatttttaataaaaatgaatatttaggaaattggaaatagtttagagataagtaataagaatgattatgggtttgtaaagattgaattgttataagattaaaaggttttttatttgtttaacgtggttaatatgatttaaaagtgagtatgatatttgtttataaatatttgagggttgagtgtaagtatggaagaaggagtagagttgtttaatatgttattaaaatgatttaattggagagaatttttaagagaaaatttaaaagtaaatataatgaagttgttttttagaaaatgtgtatttttttttttttagaggttttgttaagaatgaggaaatttagtaggttttttgaagatttgatttttttatttttataaattagtagaaatttttttaagtttgatttgtttgtataaaattatttagaaagtgtgtttatttatagattttagaaaatcggtagtataggattttagatttttgggtaattatattttatttttatttatttttgtggtttgttattagtagagaggtagattaaaagattgtttaattttgtttatattaaggttggtttttaaaattttatatttttaaagtttaaatagtttggtttagaatttattaagaaataattgaattattgtatttttgaaaaattgtgtatatttttagttagagtttatagatatattaaaagttgtttaagagatttattttgggattatttttataagtatttagttttttgtatttttttttaataaatgtagtgttttatagtattttttagtttaaaatttgtttttattaaagtgagggtttggttttttttttaaggttgtttttaaatgaaattaaaataaaaattatgttttggattatgagtttttagagcgttttgtttaatttgatttatataaaatttaatgttaagatagtgttatgtacgtttgaaaaataaataaatagtaaatggtaattgtagaggtattttattttagaggagttggttaagggaattgttaataagtgaattttatatttttattgatttattttataaagttttatattttttatttttttattttttttaaaatatatttttttttagattgagttgaatatgtataaatattttgagagtttgatttatgttatgtagggtttattggtgtttttgaattattttaagaatttggtagtaggtttttgattttaattttttttatgtgtttttttaggttttttgcgttttttttattgttttatttttttttttttttttattgtttgtattgtattgtattattgggttaatagatgttagggaagggtaatgagtaatcggtataatattttaggaaagtgatttgttttttaattgtgtatttatgaattgtttgtattttattataaataagatagtaagtaaaataataaataatatatgaattttaaaaagacgttttaattttagagattttaagtatattttagataagaaaagtaataattaaataagtatagaatttaaaaagtaatattttaaagtaaattggatataatattttgtttcggttatgaaaaggggaggtttgaaaatattttttggtgagtttgagggatatatggaatgtaattttttaaattaatgttttttaaattgtatgtgagataattttaggtggtatatgagaaataatttttatttttataatataggtttttttgtaagattattttttatttatggcgggttttattagttttttatttatggtgattataaaaaatgttttttattagataaatttatttaataaaaatagattatttaaagatatatattaagttaataatataggcgatatggttataattataaaagtgatatttaatgtaaatgttggaaataaggttttatttaagtaaataatatatttttgtttttataattttaaaattttgttttttatgttaaatttattttaaatgtgtattgaaaattgacgttttatttgatatttagtggtgtttatgttaatatatgtatatttaagataattattagaaggtagtaatatgaagttaaataattaatatattattttggattttaaaaataatttttgtatatgtatttttatttagatgtataaaaaattatgtaggagtaaagtgattttgaaagtaaggttagtgtaattgaaaaatttgattttagaagggtataaagaaatatgttaagaaaatttattttatatttatgttaataatatgttaaagtatgaatttttattttatttaaattatatattttttatttttatttgtaggtgaaattagtatataatgttttatgttaaaatgaaatttaaaatgttgttgttttttgaggatagtattaaatttattattgtatttaatttttatatgatatttgttatagttatagaatatttttagatattatgatttataaaatatttaaattgtatatttggtttgtaatatattatatatttaaaagaattattatttttttgaatattattaatattaataatagtattatagtgattaagagtggatttaaataaaggttggtttgaaatttaggtttgttatttattagtaagtttttaaaaattttgagtttttagtttttttatatgtgaaatggagaaaataaatttgtaaaattaattaaatttgtttatttatatttttttttttagtgtatattaattggtatttttcgttaggttagaatgtgtttttaattatgttttaaattcgttttgtgttaattttattgttagaattttttttattttgagaattagaaaaggaaatattatgtttggtaatgtttatattttttaaaataaatttgtaggaaagaatatttagtaagtgatgagagtagtaacgattgtttttattattttaaatttataatattattttttttagagttttttaagtattgtagataattttttatttattaaaaaataaattgtaattataagtatttagggttgatattgtttttgaattagatagtgtttatattagttgtataagattaatttaaagtagaggatgaaattttttttttgaattttttttagaacgtaatttagtgaatatattaaaattaaattttttttgaatgggagtaatttttacggattaatttgtaattttttagattatatttaaggtaatgtagaggttgttgtattataggttttgtgattagagattattggatttgtttttggaaaagttatttatgattttttgggttttggtttttttattttttatatcggtttaataatgattatcgtagagttgttatggaagttaaatgaatttatgtattataagtgattaatataatgattgatatttagtgatttattaataaattaaaatatttattattaatatgatagagaaggtgtcgttaaaatagataataggtttttggaagaggtgattaaatggatgtaaaatttatggattgtttatttcgtttatttttgttgtgttttttggttgtggtatatatacgtgtgggtataaaatcgtaaattttatgtagtcgcgtagtgtatgcgtagaaggtttagatacgaaatgttattttagtaatgtgtttagagaagttttgacgtcgttttggaagtaagtcgttgttgtttgatttttgggcgtttgggacggatgtttatatttgtatttagtagtattggaaggggtttaggtttttcgtagtatagtttatttttagatcgtttagttttttataatatatatttttacggaaaagggtattttttttcgttagaaaaagcgttttagtttggtttgggttggtttttattttacgttgttgtaagtaggcgaagttttttttgtttttttttttggggtaagtggaaaggagttcggtagggggttcgtagtggtttgtataggggaattgggtagcgagagagttttaggtaatttcgggggttgttttatagaagtaggtggggatcgatagtggtttttcggtttagggaggagagcgcggtcgcgggtttttttttttagtttggaggttgtagtcgttcgagtcggttcgggtgggggcggggtgggggcggcgcggagggtacggagattacggcggcgttattcgggatatttagggtttcgaggttttgggcggtttttacgcgagatcgtaaattatgataataggtagttattcgaggttaaataaaaacggagtgggtttttcgcgcgtcgtcgtttttcgcgtttttggcggtttttttcgaggttttcggcggttttacgagttcgtagtagtcggtggcgacgtcgttttcgttttatttttttgcgtaagtgcgaggttgtcggtagcgcggcgtacgtttcggtcgttttcggttttcgcgtaaaatttttattttgtttacgtgaagttgtcgttgttttagagagggggaaagagttgcgggaaaagtcggggagtgacgattgcggcggttgggcgcgtttttttattttttttttttttttttttttttttgtcgtagttcggagttttggttttttttttttttttttttttttcggagtcggttttttttttcgtttcgtttttttttcgtttgtgtacgttatttgttgtggggtggtcgaaggggatgttttgtttttattagaggtatagcgcgaaggggaaatttcgatattggaaggaacgagaataaatatttaattacggacgtattgaatcgcggttgggatagatatttcgggaattcgaggcggatcgggcgacgaggtgagtgatttttttttttaattttcgttttagggttttcgggggagtttgagttgagagaatttttaaatttttcgggaaagtgcgcgaggtttcgtcggggacgtcgagcgttgggtattgaggacgcgtagttggacggtgcgtgggcgtttgcgttttcggggggcgtttggaggtcgggtgttttacgtttgagggttcgggtcgttcggatcgtagcggtgttttttgttttagaagacgtttttaagttttaagggtttttttcgagtttgtttgtttttttcggggtcggcgcggagtttgcgcgtaacggagtttatttagtagtttagcgcgcggtttttatttgtatttcgtttttatttggtagaggcgcgagtatcggggttttttttatattttttttatgacgtgtattattttttgatgattttttagatggtttaggcgcgaggatgttgatttagagtttttcggagggttataggcgtttgggttttttcggtgtcgggtgcgtgtgtattttaaaggttcgcgttttaatttttaggtattgatcgggttttttaattgcggcgattttattttaatagtttttatgtggcgtggattgaatgttttttgtagtttgttagggtcggtgaaattagaggcgttttgttagagtagtcgcgtttattggttcgagtagcgggtgttatggaaggtttataatttttttaaaggaagggatttggttgggtagagtaggtttttttttttttttaagtttgttgggtttggggaggtagtggaatttgaaatggttcggatttttagcgtggtgaagcgaggtttggaagtagacgtgtgtgtgtttgttttattttgcgtcgtatagtaattcgaattttcgtttggtagtatttgaaagagttttttttttttgtttgcgagattttgaatagttcggagcgattagggaatttgcggatcgagttcggtggtagagttggggcgaaagtagagagcgtaatttaatttttgttattttttttttgtttgggaggatagtgtttttttttattattattttttttttttttttttatgaagataacggatttgcgtttggggtgagagtgtgtgcgggagagtggtgtggagattgtttttttttatcgcgttttttgcgttttttttcgttatttcgagcgggtttagagagttatttatgaattttaatttgagggtaggggaggaaggtgtaggtttttttgttttttttgttaaggtgtagaatagcgttcgggcgtgtgttttggttttagagtagttttacgtggagtaatttcgtgtgtgtgtgtgtgtgtgtgtgtgtgtgttgtgtatttgatttgtgaggaggtaataggattttggtgtttaaatttagtgggtcgttggttattagtttgtttttttggttgttattatagatatttttaaaatttgatatttaagagaattaataggttaggttttatattaagggtttatatttaatagtttttttttttttttattttttttggtttggtattttgggattaacgtaattgttggagcgaaatatattttttggaatatggtattttgtttttttttttatttgtggttattttgtgaattttcgggtgtttgttagttttagtgcgggtttttgcgggatttaggtgggagttttaggagcgtttaataatcgcgggttttttattagtagtttttgaagttttatttatacgtaggtgattgataggattgaaagttgacgatggtttttttgtttgttgcgttgtttttgtttttaaaattttagggaagggattgtatttgaatttttttttcgggtacggtttggttttaagtagaattagtgtttttttttttttttttgttttttaaaatattattggtaagtttaaatttgaagaattaaaaattagagggggtggggagagaatttttttaaaaaatatttgatacgtgatacggagcgttttaggagattgtatttaaagatatttgtgtatttttaaaaataatattattttaagaaataaaaagtagtagtaataagagatagattgttttgtgtggagtaagattgttagaatttgatttttatggtaataatatcgaaagtagatataattatatttatatttattgttataaatcgtaaaaatagtttgttttatttgattaaaagttgtaagttatttaaagttaaattcgtatttaggaatgattgtataagaatgttaaaatttttgatagttatagttttgaaagtaatataattagatttgttgaaaatgttttttttttttgattattagtgatatgtatttgttttttataataagtaaaggtttataattaatatggtttttaaaagtttgtttttttttgtaaattttttgaaaatagtatgttttaatatttaaagattattgtaattatcggttggtttataattataattaaaataagatttatttagttgttttttttttattagtatttgttgaatatttgaaattgaattttttatttttaaaataaaacgttttatatatatgtatgtatttataattaatattttttttaagtagtaggtttaagttttaaaatttttaaaattttaagatttgtataaaaaggagtgattgtataaaaaggaataataattattaattgttaagaaaaatagatgttgaattttagagggtttttagaagttggagaaaaaaattgtatagaagttttttttttgacgggtgattggtagatgagttatttgttattttgttataatttattttttttttttaataaggttttttgggttaaaaaaaaaaaaggaaaaataagtattttatttttaagagttttttttttatttatgttgtattttggggtgtaaataaattttatatagttacgggaaatagagtatttaattttatgtttttagtttttgttgtaagttttaaatgattgatgtcgtgtttaaaaatatatttatatggtttgatattttattttaatattttatgtattggaattagattttttaggatttttagaaagatagaatgatagaaagacgatgattattgttataaaaagttagaatgttaggaagtttatattttaatttttaaataattaaatttattttgttttataaaaatttatagtttttatatagattttaagaagaggggtgataattttttttattatttagttaagtgttaagtaatttaagaatgtaagtatgtattatgtttttttattattatttttttttgttaggtaaatgtaagaatattggatattttgtaaaaataggtttttttttataaggagtttatttattatagttttgtattgtagttgttgattatattttatggagttgttaaagtatttaaaatttaaaattaggtattgtttggttgtaaatattttagattatttatttaagaaataaatagaaaagtgtgttattaaaagtaggagacgttttgaatttttttattgaagagttgaataaatttttattaaaatatttttttttttttttagtgagaatataattttgatagtttttttttttaaatggatattatttttatatgtattaaatgttaaatttttataacgtgtttttttgtagagtattttaaattaattatatttagaaatatagttgggggattttattataatggttattaggtgaaggaaattaatattaggggaatggggtggtattgtagtgtatttgttttttttatgaattttttttgttaaattaagaaatgatatgttgttttaggtatttgttttggagatgggtgagatgtaatatgtgtaatgttgtattttatagttagatgtgttttaatgaaggggatattgtatagttattaaattatttttggagttaaatttggcgttatttagtttgaatttaagtggaagaaaatgaataagagttatatatttaaaagaagtataagtaattttgattgtttttaagaggtttgaagattttgtaaatattattgttatttaatattgtttgtggagttgtatattaatatatgttttggtgatatgttattttacgtttgaaatttgttatttttagtgtttttttatttatttttttattagtaaagagatattgaaaatgaatattattatttttatttttttaattttttttatatttttagaaaaagagatgaaattgattaatttaaaatagaaattattttgtgttattaaaattatatttatatagtgatttgagatagttttagagagtgtatttttgagttttattgtaattttttttgttattgaaaggtgttaattgattttagggtattgatataatagtatagtttgatatttgaaattttttagagttggtttggttttttttttattttgagattttagtgtatggatgatgaagaaagatattattttaaaatattagaaatttttatttttttttaatatgaaatgttttaatatagtatgtttatatttttaaagtttttatttatatatagtaagtaaatttattttaacgtatttttggatagtaggagaaagatttatatgttttatcgtgttagaattttttagtttttttttttttgtataggtagtttatttaggttataatttttaggtaaagtttgatttttattattatatgaatatttttaaagtgaaattgcgttaaattaatgtggaatagtttttgtattattaaggtatatattaatgtagatgttaaatatgagagtatatttttttgagtatatttatattttaaagtgtatttttaaataaaagtggttattgtagtttttagataattataatttggttgttattattattataatattaattattattattattataatattatagttagtatttatttaggaatttcgtgtaaaatattgttttaagtatttatatggattagttaattttaatttttttaattatgtcgtaaattaggtatttttgttatttttattttatagataaggaagttgagatttagttatgtagtatagtggagttaggattttaattttttagtatgaggttagtatttttatttttaagcgtgtgttgggtttttgtttttattagttatatattattatttttaggtggtatttgaatattttgttttaataatatttatattttatgtaaggataattagatattagaaaaatttgttaaattttgtattaaatttgtaattttatgggtaatattgtttgagataagattaaataaagtattgaagttaaagaaaaaaaattaagtatttgaagaaacgtattaagtaatagtgaataagaatatggtttaaataattatagttatgaaggttggatagtaaatgattgaatttggagaaatgttgtattttgtaatgttttttaattattaagaatttatgattagattttttaaatatttaattaatatgtggaatttttttttgttttttaagttttatttaaattggttaaatgttattaattttgtattttttttgtttttgttttttgttgttttaatgttggttttgaattttaaatttgtatatttatgttgaattaattaataaggtttgaagagttaaagagtgtatgatggatttttggaggtaggtttaaattataatggagttgtttatattttggaaatatatttaatttatttggttatcgtatgtgtaaggttttttgtaggtaaatatttttgttgttaataatttgttttataattttatagtatttttttattgaagtagtggtttttatttttttatttatttatatatttagttacggatttttttatttaaatggaaattgatgatatgtttagtagagaaatgtgttattgttttaggtgaagtaggatgtaggtagtttgagaatgatttattaatagtatttttttacggtggtcgtcgtttttggagttttttttaagtgtttttaatgtatggaaattgttgtaaaaaaatttaagttttttgataaaaggggttaatttagagtatttgttttaatatgtttatgtggtattattaaaaaatagattgttagatacggtaaaatattttttagtgtgatatattagtagaaaggtgtgtttatttttttttttataatttgagtattcgtattaattagtttttaaattcgatttagtattgagaaaattaaaattgattaaaatgttttttgtgtgtagttataggtttgaatgaggtataaaggatttgtatttgtaaaggttgattttattaattagaatatttttttttttttaaagattgtaagaagaaatattagtagtggtttaatttgatatgattttagatttttacgtaaattattgttattatttttgttattttttttttttttttttttaaaatgaaagggatattttttgtgaaagattataattaaattataaaaatttatatttatgtgttattaagtttaattttatttataaaagtaatagtatagagtttgaaattttatttttaattaagtaggtgtattatatatcgggagggtttattatgtataaggttatatatataatttatagatttttgtatatatttaacggagtgatttatttattatattttatttttgattttgaattttttaatgttaaaagatttgaaaagaatcgaatgttttgattaagagattgaatatttttaatttaatgtttttagtatgttgaaagtgatgatgatttgggggaattagtagatttttatattatttaattttttttttttatatttgaatgtaaatgtatatttatgtgcggttatgatttaagttatttttgttaaatttaatgacgttgtaggtgaattatatttagatttttttttgtaggttttttagtaatttaaaataatgtttttagtaggtaatttaagtatgtaaattttaataaatttgttaagaacggtaattttattgttttattttgtttttttttttgtttgtttgtttttgtattaattttagttgataagatgatggtattgttattttttttagttgatttatgaagaattttaatttaggtttagtttttttttttaattgttgattttagtttttaaaggtttcgtttatgaaaatggttagtaaagttgtgggtatttggtaaatgtttgttaaatgttttttttttattagtgttgttgaagatttgtaaaattagagtgggatggatagattttttttttattttgtatggttttgaagattttggagtttttattgtatttttatatttttatatattatttttaggaatatttagagagagaattattgtaattaaggttataggtttaatttttaggtatttaaattagttttaggtggataattgttttatatatatttgttcgtattaatgttgttataataaatatagttataatattttgatgttttttttgggggtttattttggattgtgttgaagttgtttttaatatttttttacgtttttaagatatttaattatatttgtttatgatttttatgaggttttttttggatttaaaattttttaaaaaatttgtttgttgtttatagggtaaattttaaaattttttgtagggaagataattttttatattgagaattttgtttaggttgttttttttattttttattttttatttataataatttttttttttagttgtatggaaaattgtagtttttaaatatattttggatatttttattttatttttttgtgcgtggaatgttttttttttggaaaatatcgtttttttttttttgtaaatattttttttattgtttttttaatatttaaggtgtaaaatgttagtttttttgataagtttttttgatttttagagtttgagttgaacgttttttttttgttatttttaaagtatttagtttttatatttaatatagtttttgttatattgaaatgtaatagattatattagtttaaattttgttttaagttgagaatttattggaaggattagttgtatttgttatttttgtatcgttaatgtatagtgtattgttggatatatagttagtaggtagttgttatatttttattgaatgaatgagtagaggtattgggaatgagagtagagattgtgatattgaatattttttttttgagattgggaatagtgagaagggtagtgattattataaggtgggattattttaataataattttagggagttttggtataaatttagtagaattgtagttgtgaatttaggtttaggttatatgtatgtatacgtgaatgtagaaatgtgtttattttttattattgggaagttagtgatttggtggataagttaaggattttgaaaatttttggagatacggtaattttatagtatttgaaatttgagagatttagtttttatagtatagtgagtaagtagaaagaatatgggggttgggcgcggtggtttatatttgtaattttagtattttgggaggtcgaggcggatggattatttgaagttaggagttcgagattagtttgattaaaatggtaaaatttcgtttttattaaaaatataaaaattagttgggcgtggtggtgggcgtttgtaattttagttattcgggaggttgaggtaggagaattatttgaatttagaaggtagaggttgtagtgagttgagattgtattattgtattttagtttggataatagagtgagattttattttaaaaataaataaataaataaaaaggaagaagaatatggagttaggtatttgggtttagattttagttttaatattgatgagtttgtaatattaaatatattattgaaatagattttgttttagttttttatgtgtaatagaatatgttttatggggttttgatgagaatttaatgagtaaatatatgtaaatatatttagagtagtgtttgatatgagtattagttgttattattatgattgggtattttttattagattatttttaaatgttttagagatatttagagttgaaggttttttttggggggttatggattggtgattataaatggagtgtttagtagtttaagtataaattagatattgtgggttattttggtaaatttgaggttgtatttggagttttaagagaagatattataggtgtttaatagttggtattggttatttacgttgtgtagtaatattttttttagtaaatattttcgtatatagtaatttagattgttttagagttttaatttgtgtggttttttaattattttaagtaattataagtacgttgtataatggtagtattttatagttaatatttaagtttttttagttgttttttttttagtcgtaaggtattaattatgagaatttgtataatttttaatagttagtgggtttgatgaatttaatgtaaattttttaaaaggtagttttatatattgttatgatttttatttttagagagatagtaggaggtaattagtatttttatttatagaatttattatttggatttagatataatggttatgtggtaggatggggttgaaggaaaaaggaaagttaaaatattaattgttaaggttttatttttatagtttgtttggaattgttattaggtgtatttgtatagttttaaaaatgataacgttgtatttgaattttttagtatatttaaataagagttttttaagttttggttattgatattttgggttggataatttatttaggggatattgttttgtgtttggtaggatgtttagtggtatcgttggatgttagggatttttttttttttggtaatgatggtgtttttagatattgttaggtgatttttgggagtaaaattgtttttttttgagaatttataatttaagtagattttaatattatttgatatagttaaaaaatttttagggttttgtataagaggattgttttatttttagttaagtgtggagaattttaatattttttttttaagtttaaatatgaagttaaataatttttattagtttgtgttgatagattaattttgtatagaggggatttatagatacgttttatatagattgattatttttagtatattttttttttttggaaataatatatgagtgggagtaatagaatatttgagagagagtatgtaggaagtaaatatttatttgaattatttatgtgttttttttttcggttatttgttagtagatagtttggatttatttttaaataatgattattgtttttttatttttgtgggtaaatatttagtaataagaaatttttattttatttagtttgtagtgttagaaaaggtaaagttattgataattataattgttgaagattaaaatatttagtgagttaaattatttgtttgtaatgagaaatttttaaaagaattatgtgtagtttttagttgtaattataagtttaagattttgagttaataatatttgtatagttagaagaaagtaaaaataaatatattatatgtaaaaatttttttttgtgaatttttagatttaaatttttaagtttttattttatgggtttgatgttgattaatatattttatttatgaaatgatatataattgatgtaagtaaatttgattgttgtttgggtattatttttatataatttaagtatatatgaaatatattttaaaaattatttgaataaaatgggaataataatgtttatataaagtgagagaggataattttttttatatgagttttgggttgaattttaaaattattttgaaatatgaaatattaatattataaatatatgattagattaatttttttaagagttttaaatagtagataatttttattttattagaaattgtaaagatatttgaaattttatatttatgtattgtttaatttagtggttgtattttaattgtattaggtagataattatggaagtagttagattaatttggagattttatattatttattaattgatgtttaagtaggtagggtagaggtatttgaaaatatatatatatatatatatatatatatatatatatatatatatatatttatttttttttttttattttttttgatttgtgttttaattttgaaatgtgtgtttaggtggtaaagggttgtaaatatagtatattgtgtttgattaaaatatttttttgttttttaggtggagaaggattttgtatagttttttgttagtagagagataaagtgggtgttgggtaatttaatgataggtggaggtcgttttcggggagtgttgcggagaatttgagataggggtttaaattatagatagtggaggagagttttgttttatttatggataggaagtttaaagaaggtatagcgaattataggtttatttaggtattttatgttagatattgaacgggaagtttagtagttttttagttattggagaacggttaaaaatttagaggttttatttttttaaatgagtattttttgggtttataaattaaggaattttatagagtatttaagttatatatttttttttttaggttgattttttgtatagtgggttttaatgtggtaagatttatttatgaatattttattttttataatgtcgttagttatttttttttttttttttggtatatttttattatttttattttttatggttttaatttttttaatttatttgtttagtgtttttttgttgtttatttggataaaataataataataataataatttatttattttttaaggtttagtttaaatgttattttttttgtgaagttttttttaaggtttaggtagaattagtttttttttttgtgtaatattatagtattttttttggattgttaatataatagtagattgtgttggggtttattgtatgtgtttgttttttagagagattatgaatttatagaggggagagattatattttttttttttcgtaattttaatatttggagatgttaatggaaattaagtgattgtattattttatgtatatttttaaagggtattaggttttaaattagatatttgtaaaggatgaattttgttaattttttggaaaattggtttttttttgtttgtggttatgaaagttggtttattggttattttttattttaatttatttaaagttttatttgtattaaagtattattgattttttagtggaaaaataggtatgttcggcgtatattggtatttttaataaattgatatttaaaagatagatttttcgttgaggtttatggtttttataattttagttttttttagaaatagattttgatttttttggttgttttttgttaagatcgattttatgttattttgaagaatttttaatttttagaattatagattttatttgagagaaagtatgttttgtatttgtttgtgttagtgttttaaaatgtgaggattaaaaattttagatgtatttattaaaaatatacgtggttttttgttgagggaaattatatttttttttttaggtataattgaggaagtaaaaaaattttgtttagtttttagtggtttgtttttaggtattttttatataaagatgagtaagattttttaaaaattattaatttgtttatttaggggggaaagtttttttatgtttagaaataatattaaattaagattattgtttttaatagttttaaaaattgtggttttatttttttgtatgagttattttttagtatagtgtagtatatgattgtattatattatgataaagtatatttgttttgtgttttagtgggttattttatttattagcgttagatgattagattagaagagagatttagtttaatttttttattttgtagatgagatgttgtattatgtgattttaagattttaagttatttatttagaataaaatagaaaaagagaattttatgttggggatattttatgtttttaattttatattttattattttatttttatttgtttgtttttgatgaggagttgagaatgttggaattagattatttttgtgtgtatttaggttttgttatttattagcgatgtgattttggttatgtaattttttgagtggttgtaagttatagttttagtatgtgtatatggggaataataatagtattcgttttatggagttgtaaggaataattgaatttatgtaggaaagatatttggtttagtgtttggtttattataaaagtttaggttatagtttgaattgatattttggaataaaatgttgagtgtatttgatatttagagaaggaaatttatgttgttaaagtaagtttttttttttaatttgttatttaaaaaatataaataagttatattttgtataatatattaaaatagagatgatagaggttatttttgagaggaatgattagagggagtaagagagaggttttggaatgttgattatgttttttattttggtttggttgttggttatgtgaaagtgtttatttaataaaaatttattagtgattaatttttgatttatgtattttattttattgtgtatatgttatatttttttaaaaagttttaaaaatacggatatatttaaagtaaaaagtggatttatttatttttattttttgtaaattaggataagttgttatatttagatgtgtatttttttaggtatttttttttttatatatgtgtaaatgtaataattatgtgaggatgtaatttatttttattttatatttttaattttaataggattattgatttttttaaaatttgtttttgatttgttgaattttgaatatttttttatattagtatatatagttttgggtgtttttatttaatgtatgtagatattttataattttattgttttttttttggtgtatgtttatattgtttttatatttttattattattaagtatgttgtattgatgatttttatgttttttcgtatatttgttaaaaatatttgtagataaaattttagatgtaatattaatagataaatatgtatgtgtattttttatagaaaatattaaaatgttttttaaaaagatttatgaattttgtatttttaaggtaatatttttattttttttataaaaattaggtgtaaaaattttaatttaattgaattttgtaattatttgtgttttggttaagaaaaatggttatagtagtaaattttttgaaatttatatagtaatcggaatattttattatgattaggataaataattttattaacgatatatatttaatatatatatataatttatataattagttttttatttaagaatatttagtatttatttttatgaatgtatattatatttatttatggttcgtaagtttaaatgttaggaagaaataaattagtaatattatatttattatatttttttttatttagtattattaaatatttattagaattattaggagaaatggttttaatttttatgtgattggtgagaatttatgaggaatgatatattgttattttagtaagagtttattttgtgttaggtatagttttaagtattttatatatattacgatagttttttaatatagagatgaaaggtatagatattgtataagtaataaatgatattattttattataaatgtgttgataaatattattatatatgttataatattagttgtgttatattaatgattaatttataaatttgttatttattataatttgtttaatgtggaaataaaagttaatgtattaaaatttagaaaattgttatttaaatgttggttaaagtaatttgatagatatagttttaaaatgaagtatattaattagttgattttgttgttcgatttttatatgtagaaaattttgtttttagaatatttagtttttgtagtttttggttaagattttgattaatttttaatggttatttagtgtttttaaaaagtagtttaatttagaatagttaatgtattttttttgtattgaataaatatggttattaatttttgtggggtttttttttttgtagaattttttgttattttaagggatttaataggatttatatatataaaattgaaaattatattattatggggaagttgttttgtgttttttagaaggaatttttttgttaatttaagtattgtatgtgtgtagaatagttaatattttttttttaagaaattttatgtatgtagttaaaatatttttaaattgattaaggatttgttatatatttttagaagtatttaagagtatttttatggttataagagtagagtgtattagaatgttagaaattaatgaatacgttagaggtttttaaaattgtgtttaatatttttgattttattatataaatatgtggggtagtttggaaaaataaaataatttttttttttttaacgtaggtgaggtttgtgatgataatattttaattggtttgaatattaatttgatatttttttgttagaagtaatttttattatttagtaaatgaaatggagaggtaataaatatgattgatatttattttttgagtaaagtattattttatattagattcgattagttatttttattttttttggaaaatgtattatataaattattatagtattttgtttattaattagggaagttaaaaaacgttttataaacgttgaattaaaatttttattgttgtgagggaattaaattttaagtaatatattttttttatagggtgagaaattgaagtatggagaaattataaggtttttttaaagttatatattgagttatggtagatatagaaatttataattttgtttgtttgatttaatttgaaattttatgaaacgtaatttatttattttttgatatgtgttttagaagtatatttttttatttgtttatttatgtttttatttatttatttatgtatgtatttatgtattattgattatttatgtatttatttatttatttatgtattttaaaagaatcggtgtttttgtatgatatagttttgatttagggattatgaatattttgaatttatatattttagatatttttttaaagaaatttattgtattttttttacgattatgaaaaagaaattaagatattaagaaaattaagttggattgtttaagtgtgggttatagtagtgtttatgggtagtatttgaagttaatttaggagtgaatttagtttgtttaagtgtttgaataagaatttggttgaagttttggaggagatgtttggggtatagagtggggacgaggaaaaattatagtatttttagagagtattgtaaggattagtatttatatttttattatttgatgtttttatatttggtttagttaagagagagggggtaaattattttgttttttattttgttatttttttgattttagtttttacgttttaaatttttttttattgcgattttttttttattagtttaattagtattttttcgcgttttttttattaaattcgtttttttttattagtttgcggagttatattttttgatcgaattgttggggttataagtaatttgaaatgaggaaagtgtttagtaattttttttagtttagtattttgtaatagagattttagagtacgtagtgatgatatttgtttttttttttttttatagagagtttagtgggtaatttttttggtttgtttttttgttttttttttgtagttttaagatttaggatttagatttggtttttgtttgtatggttttttatttttttttttggaagagttttttttcgggggttttttaggtttaagagtatttggatttttgggagatgaatttgtagattttataaagaatatttaagtattaggtaaattatatttttttgtagtttaaacgttagttttttttttttttttaattttattgaagaataatttagtttttaataaataagtaaatagaattttagggttttttttaaaggtgtatttttgttgttttgaagattattattattaatttttattttagttaattggtttttttttatatttttatttgggtataaatgtgatattttggtatatattaatgttgatttatattaatacgttaatttataattgagtgatttaaaaataatgatgtattatgatttagtttatatttgttttttatttaatgtattttttaagtaattatgtttttgtggttgattgaatttttttataattttttgttgggaaataaagatttttttttaaattgaagaagtggttttgttaattaggggtatcgtatttaatttgagagaaaaagattaggaatgataggaatgatagtatatttttaatatttaatagtttgttatatatgtgaaagtaggatatatagtagggaagtataacgttgagttgatttaaaatattaaatgtatttgatatattattttttgaatttttataattttagtttttttaaaggtttttggatttttagaagttataagggtagtttttggtaaaggtggttttatttttaatttagttatagagttagtggaatgatttttatatttaaatgttataggggaatttattgagaggaaaaagggtatttaaatttttttggatgttttaattaaaaatttggattaataaaatttttttaagtgttttaaatttaaggaaagtaaatagtattttatttaattatatttttaattagtatttattatagatataatttaaattagtaatttggtattagatgaattagatttattgttatattatataatttttatgtttattttgttgtgtttgggatttttttttttttataataaagaatatgatttataggtgttatattttgatttttgagaaattaatgttatagaaaagttgtttggaaagatataattgtgattttgttattgtttttgttgttattatttttttttatggggatgggtatatattttttgagatttattagatttattttgtagtttataaattatttttttagatgtatttaatttgttgtttagtttgttttttgtaaaaaaatttagtgaatatatttttaaaaatatttttatggtttttttttaggtttgtgtgtatatttttttcgtgtgtggttttttaattttatttttgttttttttgtgtttgttttaagtatatttatttagttttttttatattgttttgtagttttatatttttagatttttaatttgttgttgtggttattttttattgtgttttgtttttttatgtagtttataattttttttttttttttgagatggagttgtgttttgttgtttaggttggagtgtagtggtacgattttggtttattgtaatttttgttttttgggtttaggcgatttttttgttttagtttttcgaatagttgggattataggtgtttattattatgtttagttaatttttgtatttttagtagaaaaggggtttcgttatgttagttaggttggttttaaatttttgattttaagtgatttgtttgtttgagttttttaatgtgttgggattataggtatgagttatcgtatttcgtttgtagtttataatttttggtggattttttttttagaattttttgtattttgtggagtaattttgtatttttttggagtttagggattttaaatttttaggttagtttttattttattttatttttttgttttgaggtttttatattatagatgtagtaaatatttagaatttatattttgtaaggttgaagttttgatttattttatttaagaaattatttttttttattttttttttaaaggttttattataggataggtttttttgttgaatttgatggtgggtcgagtttttttattttttttttaataaatgtgataaattttttagatttttttttttgtggattgttttttgtttttgttttttgtttatcgttataaaagaagataatgataataaaacgataataatataaatgtaaacgtattttttttttttaatttttttatattattaattttttatgaattaaggtgtgatatttgaaagttatatttgttttattagttatatttatatagtttttttgttttattgatgtattttttatattattttttatatttatttttttaggtttttttttattttatgttagtttagatttttttggttttttatttggagcgttatagtagtttttaagttgttatttaattttattttttgtttattttgtttgttagaaatttgaagtagatgtgttgttgtaatgatattatatgtgttattttttgttttgggggttttaaggtttttaaggttattaaaatattgtaataattaattgttttaattgtattttgtatttatttttttgtttttgttaatttaaaatgttttaatattttgttaatattgaatgttgatgtttttttattttttttttttttatatgttcgtttataattgtttattgattatattagttttttaatattaaaggtattagttataattttgatgttatatagaatgataattaaaaggtgataaatgttaatgatttaatcgaggagttgtttatttttataagtttatttgagtttagagaattggtaaaagattggtgatttttggttattatttaaatataattggttaatgtagtttttggagattagtggttagtataatatttttagttgagtagggttaaaaataattatatttgtttaagttgtagatattattttattgtatagtaaagaatgttaaaatgttttaatttagtatatgaagagtaaaatataaaaataggtttttttttatttttattagtaagtaaagtggtttgtatttttgaaatatattttttgtttaattataataaaatataatataaatgttattaaaagttttattttatggatgaagatagtgatatttagagatattaattagtttttttaagattatatatttatttagtagtaaaagtaagtttttataagttgatttattttattttagtttttatttggaattattaaatttatattttttttagtaaaattatcgtttatatttttagggttttaagagtttaatgttaaatttgggagatttatttttaaatttttttaaagtgtaatatattttttttaggatgattataaagttattagatgtgtgttaagtaatatatatagttatatatttttgattaaaaaagatttttaggttatatagaagagagatttatggttgagaaaaaggtagattgtttttaagaaaggttttaaatatatttttttttgataggttataggagagttagttagatgaattattatagtgtgtataaaatgtttagtagaataattttttagtattggtagggaagagtaataggagtaatataagagaaggaaagttggtttgtagagtttgttttagtattcgtaggggtgatgaggttgtttgggttaagaatttttttatatgtttttttgggataatttatttagaattatttttgtgttttttaggttatttaggtaattattattaattagtaaatatagataaaatagaatattttgtttggatttgtttgttaaaaattaaatgattataatttataattttaggaagatttgttattaaatgaatttatgataaatgatttaaatgatttttataaagtagagtttgttgtaatttttagtatgagaagtatgaattttattattattttttaaatattttgagttaaatggatcgttttgtaaagtttatgttttatttttatagatagtttaaaaatagtttagtatttagtttgtaggttggttttatttaaggagtttgaagttaggtaaggtgtttattattatttatttagatttgttttttggatattttagttgttttttttttttacggttagggaggagagttatgtgtatagtttaagaatgtgtatttttatgtttttgaatagttggttatagaattggagttaggtgttttttgtgttattggtttttttttttggtatgtttttcgggtggttggagttagttagtgtttgatttagttttatagatttagtaatgaaatttggagggtagagtaggtaattaggtatataagaattgtaaagtaatgtttatttggatagttgattataattataattttttaataatgtaataggaatataaattgttagattttttatattattgtaatataaagaagataattgaaggtcgtgaagatagtttatgaaatgtaaggaagaattggataattaagtaataggaagagtagagaaatagtgagattttgggagttataagatttgggtgtttaaattttgttaggatttttttgttatttttatttttgtttttttttttcggttagtttttttttgtttttttttatagattagtttttttttatatggatatgaaacgtttttaagttttatattttaggggttttgttattgaaggaggattagtttgatatttttttagatttatattttaaggaagatgaattattagatttaagtaatttcgtgtaattggagaagatttgtagattttatttaatgggttaagttggatatgtatttgtgggagggagatatgttttgtgggtataatatatatgtaagtaaattttaatattgtataagatacgtttttgaaaatttatttgtagtttgaaaatttggaagttaaatagtagattaattgttgtgagtgttagaatttagtgtaatggtattttttgtgatttaggtaattttgtataggtagaaagatttttgaaagttttatttaggttggaaagggtttgtgttagaggttatgagtgggattttttaggtatttgtttttttattttaaggtttgtatatggattggaataaaagttttggtagttgtaatttttaaatttttttttaagggtatttagggatttaaagtagtagggaatgtatttttttatttttttttgtttttttttttattgtagtaagaggtaagtatagtttttagttttgtttgtatttttataggagatttatgtataggtttcgggttttggttgtaggatagtgtgaggttgttgatagggcgagagaatggcgagaataatggaataggattgagggagaaggaagaggaatcgtttttagaattattatttgggacggtggttttagggagtaaaaaatatttttggagtttttttaaggggttttttggtagagcggtattatcgttagatattgttatggttgtaggtaggattgattaaagaatttttgattttttttgaggatagggtaaagttttgaattgtttttagagattgtatttagatttatatttcggaattattattttggttgtattgtgaacggtaacgtttagggagtaggattggagggaaggagattattacgtggttgttgtttttgtttaagtagggaataatgatggcggaacgtttgtattggtagagaggagagagaggagggatttggcgaatttttggaggtattggtaggatttggtaatatattgaatgtggagagtaaatgggtagggagttagtgataaagtttaggtgtttggttttgatgattggttatgtttgtgtcggttgtgtatagaatttagaggtttagcgtttttatgtgtagcgtcggtttttatttcgcggtagtttggtgtggagttgagatgtgttttttttattttatgtttacgtttttttagttagagtaaagtatgtttggataatttaggttttttttttttttttttttttttttttagagagagagggttttcgttttgttatttagaagaagtgtagtgtcgtgattatagtttattgtagttttgaatttttggttttaagtgattagaggattaggtgtatttttttataaattttttaaattttttttagtattttattttttaagggattttatagttttttttatttggacggcgttatggtgttttattttatttttgagaattgttttaaaattttatatagaaatttgttattatgtatttaaatgagaagaaatgttgaatttgtaattttaattttttaagataagagtttgtagttcgtttttagtagagttaaagaaaaagatatgatgaatggtttatatattgaaaattgtagaagaaataatttaatatggaatgggtgaggttgttataggtggtgtaaaaataattgcggtttttgttgttatttttagtggtaaaaatcgtaattgtttttgtataaatttaataatattgtttgaaatttatattttttggtggaatagttttgagatagagcgggaattagattattggtttataaaatagtatgtagttattgttattttttaattttatatttttattatgaggtaatgttttttttatttgatttggagaatgtttttattttttttttatatatttgtgaaaattaaatgttaaaggaattaatataataattattgttaaattatgatgtaaaataatattgtgtttgtaattagtttaggtagttttatttggtttaataatataaaattattaggtttataatattttagtattttagtgtgattggttaagaaaaaaatttacgttattataaaaagttaaattaagtaataattaatttaaattttaaggaaatataaagtaaagtattatgttgtaatatggaatattaatgtaaataattttttaatagtttatgaaatagattttgaattggtagttgataaagaaaggttagttttggtttaatttttttatgttttaatattttttttgaagttttatttaattttatttgcgttagtaatagtattttgagatggtggtgtatttggaaaattattattttttttttgataattagtatttttaatttaatttttatatatgttttttggaaatattatatttatattttgatgacgttttaaaaataattttaatgtaataattatatatgtgtggtgagtaaattgtgtttcgtaaaagatatttttaaattttaatgtttgtatttgggaatgtgattttatttggaaatagggtttttgtaggtatgattaagttaaaatgagattttattggattaggatgggttttaatataatgattgttgtatttaagaggaaaatttgtatagagatatatatatatataaaagaatgttatgtaacgttaggtacggagaatattatgtgataatgaaggtagagattggagtgatgtatttatgagttaaggatggttagtaatttttagaagttggggagagataaaggatgtttttttaggatttttagagtaagtataaatttgttagtattttgatttaggattttttttttttagaattgtgagaatagattttagttttaagttatttagtttgtggtattttgttataggagttttaggaaattaatgtaatatgttatgttgtaaataaatagtagttttaattggtataaataataattttaagtatattttattattaggttaggtgagtaggaaattgtttggtagattaattattaatgttgtattttttgaaaagttaaaatatttttatttagtaaataatatttgtttaaaagtttttatttgtattgttttaaaataaagtaaaaattaaaatggagttagttatgtatttgaaaaatgtgaaaaaggaaagaaaaattttttaggaaagattttttttaaaatggttatatatttgagaaagaattttaaaatttaaattatttggttgtttattttatttttttgtttatattattagatatattatgtatgattttatatattatgtatgttatatttaattaatatttattaaatatttaaaatttgttaggttttgagttaggtattgtagataggtaaataagataaatattttttttttttaaagagattattttggtatgaaatttaatttgtagaagaagtgaaagaggttatttgtagagtttattatgaaaatttatttttattatttgttgtagttttatttgattttgtgaaattattttagtattatttggttttattttgtgtttttgtattatattggagaaaataaaatttatttattgtatagataatataaaattaattaaagtatgtgaaattaaaaatgtaattgtttattaaattttttttagtgttttttatttattagtatttaaatatatttttagttgtgtatttatgttagtataattaaaatgtggtgtttttatttttttatttaatttataattaataatgtttatttttttattttttttttttgagatagagttttattttgttatatttaggttggagtgtagtggtatgattttggtatattgtaattttcgttttttgggtttaagcgatttttttgttttagttttttgagtaattgggattataggcgttcgttattatgttcggttaattttttgtattttagtagagatagggttttattatgttggttaggttggtttcgaatttttgattttaggtgattcgtttatttcggttttttaaagtgttgggattataggtatgaattattacgtttggttttttattatttttataattatttttttgattattaaattatattatataattgattatgatttgtttaattaatttattgtaaagatgaggttgtttttagtttttattgttatgaattattttgtagtttatattttacgagtttttttggggaaaggttattttttaggaaagttaatattgggtaaaagggtttaaatatatttatagtttttaaagtatagagatggattgttttttaaaaatattagaaaatgatattgttattagtaaatggttgaggatatcgtgtttatagtgtttttgatattaagtattattaatatataaatagtttgggtattgaatatgtatataataatttaaaaaatatgtatttattgtttagatttatgtattttagtaattgaaagtgaacgtttttttatatattagtttattatttatatttttttataataaattatgtttttttatttttttttaattatttagtgggtatttaaatttcgttttattaatttttatgtttttagtaagtgtatatatagttatatttatttattaaagatattttttataatttgttgtatttttttatttttggggttgtttttttttatttagaaatgtaaaggttttgttttgttttgtttatgtaggtaatgaattgtatggtttttttgtaatttaatgtagtatttttgttatttatgtaatttatgtatttattagagtaagaaggaatattagatttttttcggaaagagagtatttggttaatttgttattaaggtaatgaggagaaaatggttttaaaggagaaggttagttatagtttagtttgggagaatagagggattgatatgaggtgggtaggtgttaagttttgggtagttttgtgtttgttgattagtggttagtatttaattatttgcgtgtattatttttaaggtgaatttgagttagagtggttttggttatttgggttaggggatagtttataggattaaggattaatgggttagttaggaaaggataagtaagaaagggattagtaggaattaggattaggttgagatatttagatttgaggggaggaattagtgtattaggaggagaagagggagagtgggaggaggaaggtgggcgtgtgagttaagaggtaaaaagttgggtttttttattacggttttttagtttttatattttatgttgttttaatataaaaatattatcgtaaatttagaattttttgtttatttatatttttgaatttaaatgtgtattgttggttgggtatggtggtttatgcgtgtaattttagtattttgagaggttgaggtaggtagattatttgaggttaggggttcgagagtagtttggttaatatggtgagattttgtttttattaaaaatgtaaaaattagttaggcgtggtggtacgtttttgtagttttagttatttgggaggttgagttataatagttatttgaatttacgaggtagaggtcgtagtgagttgagattatgttattgtattataatttgggcgatagagtaggattttattttaaagatataaaataaataaaaaaatcgaatgtgtattgtattaatttttagtgtgtttgataatttattatattttatatatttttttttttttttttatatgtagtttaaaattgtgttttttttcgaaatgatgtttttttagttttggagtattttaaattaatattttattgaaattgttatattatatatatgtgttattattattttttgatttttaagaatgaaaaaaatatatttttgatttgtgtttttgttatatatgtataaaatttttgtaatttatattttaaattttttttgtaatttttaaaacgttttgtgatttaataaggaaagtaatatgtattttggaaaatattgtaaagtataaaagaaattgaagaaattaagattatgtttatttggatgtagtagggaatatatgattggatatatgtaaaattgagtaaaatatttattgatattgaatatttaataaattgaattggtatttgtattagggttttttagagggatagaattaataggatatatatatatatgggagtttattaagtattaatttatatttattattaatttaatttatttttaataattatagggttttttaataggttgtttgtaagttgaggagtaaggagagttagtgcgagttttaaaattgaagtatttggagtttgatgtttaaggataggaagtatttagtatgggagaaagatataggttgggaggttaggttagttttttttttttatatttttttatttgttttatatttattggtagcggattagattgtatttattagattaagggtggatttgttttttttagtttattgatttaaatgttaatttgttttggtaatatttttatagatatatttagggttaatattttgtattttttaatttaattaagttgatatttagtattaattattataagtttattttttgttaatttgaatttatatatattttttgagattatatattatttttaaataaagataataataaggttataattatatttaatataatatagttgttttttgtataatcggaaatgtattaatttttaatttaaatattattatataaagttaataatatttaaatgtcgatatgaagttaataaattttatgttatatgataaaggaaaaggaaataaaggtatttttttagtataagtgtatatatgtataaatatgtttttaataaaagaaggaggaaatatttatgataattatagttttcgtttttgtagtggtttcgtggtcgtagatgttattgatgattaattttttttattatttattttgtattttttttgtttttagtaagtattttaataggttatgtttttttttttttgtggagtgatttaaatttttatttttgggggatttgggttatttttagttttgtttggattgggttgttgtagttttttattgattttaattatagggcgtggtaatattaagagatattttaatggattttttgtattttatgtatatttttttttattttcgttgtggagtaatagattgattttattttgaaagtttgggttagttagttattttagttaataatgtaattttttttttagtttgttgatttaaaggtaggaggagtttaaagtgtttaggtggtaatgttaatatttagtttaatggaatcgttgttgttttttttggtggtagtgtttttttttttggaattaagatttttaggttagtagaaggtaatgtcgtgggaatattttgttagtggaaggaaaaattttgttagtgaattattaggggtgatggtgagtggtgttatttttatttttatttttgattcgtgaattcgtgaattttggttatgggagagatagtgttatatattggatgttgatttagagcgtatatggttttttagagaattttgttttagttttgtaaagtattgttatttagttggtattgtaattgtgattttaaaaggttattttattattttgttaatttagttgttttaggatgatggggtatatggtgagattagtgaattttgtgagtatgagtttattgtcgtatttttttatttataaagtgagtgtttcggttagaggtaatgttgtgtggaatattaagatagtggaaaaggtatttcgtgagttcgtggatggtagttttggtagaagtattgcgtgtagaataggtagatttatatttatagtaagtgtttattttagtgaggataaattttttttttttttatgatggaagaggtttaatataattaatttgttattaggtagttggttgattatttcgaggaatggtgttatatcgagggtttagtgttgttttttgttgttggtaaattgggtatttagtagtggtcgtagttagtttagttttggaggatggaagtttatgttgttgagtttatgtgtaatttttatttttgttattatggttattttgtttatgggtttattgggtaatgataggggtggttggggaaagaggttgagtggtgtttatagaatgggttattttatttatttgattattgaaatttttttttgttgaagtaatttatttgtgagtatttatatggaatataaatatttttttggtttttgattatttagagaggtttatttatatattttttttttagatttttttgttattagttttttaatttcgttttttttaaatttttgattatttagttaaaaattattggttatagtttatgaattagtatataattatatatttgggtattttttttttatgtaaagtgtataacgaggtgtattgtttaaagttttgttaattgggaagatttttttttagcgttgttttttagagatgttttagaaaggggttgtagtgttgtagttgtttattttagaggggtgtttttatattatgtagaattatttgtgaattaggttttagttttttttttttttgttaattgattatagggaattttcgatgagggtatcgatgtagttttggggagagaaggtagggtggtaggagtagaaattatggatatttgagttatttttttatgaatttatttgtgtttttaggatttgtttaaatttgattatatatatgttatttttatttgatgatagaatgttgttttgtacgattttttttatggttagatgggttagaaagtttttagtttatgatagttagttaaggttgtatagtgatttgatgattcgtagttaaatttttagtttttattaaagtttagtaatgggttaagagttgttttttaaaaggaaggtagttatttgtagaagatggttgggttttgttttaaaattttagaggtttttgttgttatttatttatgggggtttggtaaaggttttaaatagtatttttatttgttattggtattttaagtattattggatttgttggattatatggtttaagtggtagaatagtttgtatagtagtttggatttgttgtagagtttttttttgttttggattttaggtagttttatttggtaaagtgaatgattaaaggttttggggttaaaatgattttaatttatttttaaattttaaatgggttagaagtttggttcgttggtatagagttaggcgtggaatatgagtttttagtgggttatttttggtaagtagaattggtattgtgggaggagttaaacgttgggttaaggtattcgatgttgatgtttattagatattttatttttgttattaaaatttgtattagggttttttatagggatagaattaataggagatatatatatgtatatatatatatatatataaagggaagtttattaaatattaatttatatgtttataaggttttataataggttgtttgtaagttgaggagtaaggagagttagttcgattttttaaattgaagtatttggagtttagtgtttgagggtaggaggtatttagtacgggagaaagatgtaggttgggaagttaggttcgttttttttttttatatttttttgtttgttttatattcgttggtagttgattagattgtgtttgttagattaagggtggatttgttttttttagtttattgatttaaaatgttaattttttttggtaatatttttatagatatatttaggattaatattttgtattttttaatttaattaagttgatatttagtattaattattatagtgttcgattgtttttttagattgtaatatttttttttatttaaattgtatttttagaaatatttaatgttagtagatattttttgaaatgtgattttaatgattatgtttatttatgatgaataattttttaaatttaaattgtttttattataattttttaattttttttttttagaattagaatttgaatattagaaatgtattattgtaattttaaattatattttattgtgaatttgaatatagttttatgataattgaatatatttttgtagggtatgtgtttttttgtttgaattgtaagagttttttatatgttaagaatattagtttattgtgtttggtatttgtataggtatttttagatttttttgtgttttttaatttttattgtgtgtgtgtgggtgtgtgtgtgtgcgtgtatgtgttttaaaagagagagtaagagagaggatttagggttatttgggtttttggtgtgttttttattgttattatgataaaattttttatttggggatttaaaaatatatgtttattttttttagagttttttaattttaatttatttgaaaatattttaatgtatggtatggagtaaagatattttttgaatagttaattagttattttattatagtgtattattaattattttttttatgtttatttgtaatatattttttaatatattgtttttttaaggttggttatgtattttatatttttaaaaagtgaagagtaattattttttagaagaataattatttgataatttaaatttttttgtaagagaaagttgttatattaaaatgtatatttatttttttaaattattttatgtatttttgaaagtaaatggttaatttaaatttttgattgttaatttgttaattgtttgatgatatattttttttagtaaaatagtgtattaattgtttattgtagattgtgtttagtgtagattatggatatttttgttgatttgtagaatttttgattagttgtttatatattttatttttattatgatattatttttaagattattaattgtattagatatggagataatattagtggattttttttttgagagaatgtttttataagttattaattattatgttatgttttgatatgtttttgtaattttataaatgaatataaagataatattttttttttttgtttttatttttttgttttaga

SEQ ID NO: 472 - DNA, 38342 bp, Artificial Sequence
  chemically treated genomic DNA (Homo sapiens)
tttaaaataagaagatggaaataaaggggaaaaatgttatttttatatttatttgtaaggttataaaaatatattaagatatagtatggtaattagtaatttgtaggagtatttttttaagaagaaaatttattaatattgtttttatatttgatgtaattaatgattttgaaaatagtgttatggtaaaagtggggtatgtgaatagttagttaggaattttatagattaataaaaatatttatagtttgtattaaatatagtttgtaataaatagttaatatattattttattgagggaggtatgttattaagtaattgatagattaataattaagagtttgaattaattatttatttttaaaagtatataaaataatttgaaaaagtaagtgtgtattttaatatgataatttttttttataggaaaatttgaattattagatgattatttttttgaaaaataattattttttattttttaaaaatataaaatatatgattaattttaaaaagataatatgttaaagaatgtattataaataaatatgggaaagataattagtaatatattatggtgagataattggttaattatttaaaaaatatttttattttatattatatattaaaatatttttaaatgaattaaagttgaaaaattttaagaaaaataggtatatatttttaaatttttagatagaggattttattatagtagtaatagaagatatattaaaaatttaagtaattttgaatttttttttttgtttttttttttaaaatatatatacgtatatatatatatttatatatatataatgaaaattaaaaggtatagaaaaatttagaaatatttgtgtaaatattaaatataatgggttgatgtttttaatatataaagagtttttataatttaaatagaaaggtatatgttttatagaaatatgtttaattattataaaattgtgtttaaatttataatgaaatgtaatttaaaattgtaatggtatatttttagtgtttaaattttaattttaaaaaagaaaaattaaaagattataataaaaataatttagatttaaaaagttgtttattatagatgaatataattattgaagttatattttaagaaatatttattgatattaaatatttttgaaaatataatttaaatggaaaagagtattataatttaaagaaataatcggatattgtggtggttaatattgagtgttaatttgattggattgaaggatataaagtattgattttgggtatgtttgtgagggtgttgttaaaggagattaatattttgagttagtgggttgaagaaggtagatttatttttaatttggtaggtataatttaattagttgttagcgaatataaagtaggtagaaaagtgtgaaaaaaagagacgggtttagttttttagtttatatttttttttcgtgttagatgttttttgtttttaaatattggattttaagtgttttagtttggggaatcggattggttttttttgttttttagtttgtaagtagtttattgtgaaattttgtgaatatgtgagttaatatttaataaatttttttttatatatatatatatatatatatatatatattttttattagttttgtttttatagagaattttaatatagattttggtaataagagtggggtgtttaatgagtattagtatcgggtgttttaatttagcgtttggttttttttatagtgttagttttgtttattaaaagtggtttattagggatttatattttacgtttagttttatgttagcgagttaggtttttaatttatttaaagtttgaaaataggttgagattattttggttttaagatttttaattatttattttattaaataaaattgtttggggtttagaataggagaaggttttgtaataggtttaggttgttgtgtaagttgttttgttatttgggttatatgatttagtagatttaatggtgtttgaggtgttagtagtagatagggatgttgtttggagtttttgttaggtttttataggtgaatgatagtaaaggtttttaggattttggagtaaggtttaattattttttatagataattattttttttttgagagatagtttttggtttattattgggttttggtggaaattgaaggtttgattacgagttattaagttattatgtaattttaattggttattatgaattgggagttttttgatttatttggttataaagaaggtcgtatagagtagtattttattattaaatgaaagtagtatatatgtgattaggtttgagtaggttttgaaggtataagtaagtttatgaggaagtggtttaaatgtttatggtttttatttttgttattttattttttttttttaaggttgtatcgatgtttttatcgggagttttttatgattagttgatagaggaagagaagattagggtttgatttataaatggttttgtatgatatggaggtatttttttaaagtggatagttgtagtattatagtttttttttgggatatttttgaaggatagcgttgaagggaaatttttttagttggtagaattttgagtagtgtatttcgttgtgtattttgtatgaaggagaaatgtttagatgtgtgattatatattgatttatgggttgtagttaatggtttttggttggatggttagagatttggaagaagcgggattggaaaattggtgataaagaaatttggggaaaagatatgtgaatagatttttttgagtgattaaaaattaggaaggtatttgtattttatatgagtgtttataaatgggttattttagtagaggaggattttaataattaagtggataggatgatttattttgtggatattatttagtttttttttttagttatttttgttattgtttaatgggtttatgaataaagtggttatggtggtagggatggaggttatatatgggtttagtaatatggatttttattttttaaggttaaattggttacggttattgttgagtgtttaatttgttagtagtagagagtaatattgagttttcgatgtggtattatttttcggggtgattagttagttatttggtggtaggttgattatattggattttttttattatagaaagggaagaggtttgtttttattggaatagatatttattgtggatatgggtttgtttattttgtacgtaatgtttttgttaagattattatttacggatttacggaatgttttttttattgttttggtattttatatagtattgtttttgatcgaggtatttattttatggataaagaagtgcgataatgggtttatgtttatagaatttattggttttattatgtattttattattttgaagtagttggattgatagaatggtggaatggttttttgaagttataattataatgttaattaggtgataatattttgtagggttggggtaaagttttttagaaagttatgtacgttttgaattagtatttaatatatggtattgttttttttatagttaggatttacgggtttacgaattaagggtggaagtggaagtggtattatttattattatttttagtgatttattagtaaaatttttttttttattagtaaaatgtttttacgatattattttttgttggtttagaggttttagttttagagggaggaatattgttattaggagagataataacgattttattaaattggatgttaatattgttatttggatattttgggttttttttatttttaagttaataggttaagaggggagttatattgttggttggggtgattgattgatttagatttttaagatgaaattagtttattattttataacggaggtaaggaagagtatgtatggaatataggagatttattagggtgttttttagtattattacgttttatgattaaggttaatgggaaattataatagtttaatttaggtaggattagaaatggtttagattttttaggaatgaaggtttgggttattttataaggaaaaaaaaatatgatttgttgaggtgtttgttgaaggtaaagggaatatagaatgggtagtagaagaagttagttattaatagtatttacgattacgagattattgtagaaacggggattgtaattgttatgagtatttttttttttttttgttaaaaatatgtttgtgtatgtatatatttgtattaagaaaatatttttattttttttttttttattatgtgatataagatttattgattttatatcggtatttaaatattgttaattttatgtaatagtatttgggttggggattggtgtattttcggttatataaaggatagttgtattatgttaggtataattatgattttattattgtttttatttgaagatgatgtataattttaggagatgtatatgggtttaagttgataaggggtggatttgtgatggttaatattgaatgttaatttgattggattgaaggatataaagtattgattttgggtgtgtttgtgagggtgttgttaaaatagattaatatttgagttagtgggttgaagaaggtagatttatttttaatttggtgggtataatttaattcgttgttagtgaatataaagtaggtagaaaaatgtgaaaaagagagattggtttagttttttagtttatattttttttttatgttggatattttttgtttttgaatattaggttttaagtgttttagttttgggattcgtattggttttttttgttttttagtttgtagatagtttattggaggattttgtgattgttaagggtaagttaagttaataataagtgtaagttaatatttaataaatttttatatatatatatattttattagttttgtttttttagagaattttaatatagatgttaatttagtttattgaatatttaatattagtagatgttttgtttagttttatatatatttagttatatattttttattgtatttaagtaggtatggttttaatttttttaattttttttatgttttgtaatattttttaaagtatatgttattttttttattagattataagacgttttaaaaattataagagaaatttaaaatgtaaattgtaaaagttttatgtatatataatagagatatagattaaaggtatgttttttttatttttaaaagttagaaaataataataatatatgtatataatgtgatagttttagtgagatattgatttaaaatattttaaaattaggaaagtattatttcgaagaaaagtataattttaaattgtatatgaaaagggaagggagggtatataggatatggtggattattaagtatattgaaagttgatgtagtatatattcggtttttttgtttgttttgtgtttttgagatgaagttttgttttgtcgtttaggttgtagtgtagtggtataattttagtttattgcgatttttgtttcgtgggtttaagtgattgttgtgatttagttttttaagtagttgggattataggagcgtgttattacgtttggttaatttttgtatttttagtagagatagggttttattatgttggttaggttgttttcgaatttttggttttaggtgatttgtttgttttagttttttaaagtgttgggattatacgtatgagttattatgtttagttagtagtatatatttgaatttaggagtataagtaggtagagagttttagatttacggtggtgtttttgtgttgggatagtatggggtgtggaggttaagaaatcgtgatggaaaagtttagttttttgttttttagtttatacgtttatttttttttttttatttttttttttttttttttgatgtattggtttttttttttaaatttgggtattttagtttggttttgatttttgttaattttttttttgtttatttttttttagttgatttattgatttttggttttgtgaattgttttttggtttaagtaattaagattattttggtttaggtttattttggaaatgatgtacgtaaatagttaagtgttggttattggttagtaggtatagagttgtttaagatttgatatttgtttattttatgttaatttttttatttttttagattgaattgtggttggtttttttttttagagttattttttttttattattttgataataaattagttaagtgtttttttttcgaggaaaatttgatgtttttttttattttgatagatatatggattatataaatggtaaaaatattgtattggattgtaaagagattatataatttattgtttatataaataaaataaagtaaaatttttgtatttttgaataaagaaaaatagttttaaaagtaaaaggatataatagattatggaaaatatttttagtaaataaatgtgattatatatatatttattgaggatataaaaattagtgaggcgaagtttaaatgtttattaaatgattaggaaagagtaggagaatataatttattataagaaaatgtaaataataaattaatatatggaaaagcgtttatttttagttattgaaatatataaatttgagtaataagtatatgttttttggattattgtatatatatttaatgtttaaattatttatatattgataatatttaatattagaaatattgtgaatacggtgtttttaattatttgttagtaataatgttattttttaatatttttagaaagtaatttatttttgtattttaaaagttataaatatgtttaagtttttttatttagtattaatttttttaagaagtaatttttttttaaaaaaattcgtaaaatataaattatagaataatttatgataatgaaaattagaaatagttttatttttgtagtggattaattaaataaattatggttagttgtataatataatttaatgattaaaaaagtaattataaaaatgatgaggggttaggcgtggtggtttatgtttgtaattttagtattttgggaggtcgaggtgggcggattatttgaggttaggagttcgagattagtttgattaatatggtgaaattttgtttttattaaaatataaaaaattagtcgggtatggtggcgggcgtttgtaattttaattatttaggaggttgaggtaggagaatcgtttgaatttaggaggcggaggttgtagtgtgttaagattatgttattgtattttagtttgggtgtgatagagtgagattttgttttaaaaaaaaaaagtggaaaagtgaatattgttgattgtgaattagatgaaaaaataagaatattatattttagttatgttaatatggatgtataattaagaatgtatttggatattgatgaatgggaaatattaaaaaaaatttgataaataattatatttttggttttatatattttaattaattttatgttgtttgtgtaataagtaaattttattttttttaatataatatagaagtataaagtaaaattaaatgatgttaaaatggttttataggattaggtaaaattatagtagatagtgaaaatgaatttttatggtagattttgtaaatggttttttttattttttttatagattaaattttatgttaaaataatttttttaggggaagggaatgtttgttttatttatttatttataatatttagtttaaggtttagtaaattttaggtatttaataaatattgattgaatgtaatatatataatgtatgaaattatatataatgtatttgataatgtaaataaaaaaatggaataaatagttagatgatttaagttttaaaatttttttttaaatgtatagttattttaggaaaaattttttttaaaagatttttttttttttttttatattttttaggtatataattgattttattttaatttttgttttgttttaggataatatagatagaaatttttagataagtattatttattgaatgggaatattttaattttttagaaaatataatattgataattagtttattaggtaattttttatttatttgatttaataataaaatatatttaaaattattatttatattaattagaattattgtttatttataatatagtatgttgtattagttttttaggatttttataataaagtattataaattgggtggtttagaattgaaatttatttttatagttttggaggaaagaagttttaaattaaggtgttggtagatttatgtttgttttggagattttagggaagtattttttgtttttttttagtttttgggggttgttggttatttttggtttatagatgtattattttaatttttgtttttattgttatatgatgtttttcgtgtttaacgttatatggtatttttttgtgtgtgtgtatgtttttgtataaattttttttttaagtataatagttattgtattaggatttattttaatttagtaaaattttattttaatttgattatatttgtaaagattttgtttttaaatgaggttatatttttaaatatagatattaggatttaaaagtattttttacggaatataatttatttattatatatgtataattattatattgaaattatttttaagacgttattaaagtatgaatgtaatatttttagaaagtatatgtaagaattaaattaaagatattgattgttaggaaagaagtgataattttttagatgtattattattttagagtattgttgttaacgtaagtgaaattaaataagattttaggaaagatattggagtataagagaattaagttaaaattagtttttttttgttaattgttagtttagaatttattttatgaattgttggggagttatttatattaatgttttatgttataatataatattttgttttatatttttttgaaatttagattaattgttatttggtttgattttttatggtaacgtgaattttttttttggttaattatattaaggtattaaaatattatgagtttagtgattttatattattgaattaagtaaaattatttaggttaattgtagatatagtattattttatattataatttagtaatggttgttatgttaatttttttaatatttagtttttataaatatatgagaaaaagatgagaatattttttaaattaagtaagagaagtattattttataataaagatataagattaaggaataatagtaattgtatgttgttttatgagttaataatttagttttcgttttattttaagattgttttattagaaaatatgaattttaaatagtattattaggtttgtgtaaaaataattgcggtttttgttattgaaagtaatagtaaaaatcgtaattatttttgtattatttgtagtaattttatttattttatattagattattttttttgtagtttttaatatatagattatttattatatttttttttttaattttgttagaagcgagttataaatttttgttttagaaaattagaattataaatttaatatttttttttatttaaatatataatagtaagtttttatataaagttttaagataatttttagaaatggaatgaggtattatggcgtcgtttaggtgggagagattgtaaggttttttaaggaatgagatgttgaaggaggtttgagaagtttgtagagaagtatatttaattttttgattatttgaggttaggagtttaaggttgtagtgagttatgattacgatattgtattttttttaggtgatagagcggagattttttttttttagagaaaagaaagaaagaaagaaagaaatttaggttgtttaggtatgttttgttttggttaaagaaacgtgaatatggagtggagggggtatattttaattttatattaggttgtcgcggaatgaggatcgacgttgtatatggaaacgttaaatttttggattttgtatataatcggtataggtatagttagttattaaagttaaatatttaggttttgttattgattttttgtttatttgttttttatatttaatatattattaagttttattaatatttttaaaagttcgttaaatttttttttttttttttttttgttagtataggcgtttcgttattattgttttttgtttgggtaggagtaatagttacgtaatggtttttttttttttagttttgttttttggacgttatcgtttatagtgtaattagagtgatggtttcgaaatatagatttgaatgtagtttttaaaaataatttagagttttattttgtttttagaagaaattagaaattttttaattagttttatttgtagttatggtagtgtttagcggtagtatcgttttgttaaaaggttttttgaaggggttttaggggtgttttttgttttttgggattatcgttttaagtagtagttttggggacgatttttttttttttttttttagttttgttttattgttttcgttattttttcgttttgttagtagttttatattgttttgtagttagagttcgggatttgtatatgagttttttgtgagggtataagtagggttgagggttatatttgttttttgttgtagtgaaaaggaaaataagggaaagtgggggagtatattttttattgttttaaatttttagatatttttgggaaaagatttaaaaattgtagttgttaaaatttttgttttagtttatgtgtagattttgggatggggaaataggtgtttgaagagttttatttatgatttttgatatagattttttttaatttgggtggggtttttaagaatttttttgtttatgtagagttgtttgggttatagaaagtgttattatattaaattttaatatttataatagttggtttattgtttggtttttagatttttaaattgtaagtaaatttttagaagcgtattttgtataatattaaggtttgtttgtatgtgtattatatttataaaatatattttttttttatagatgtatatttagtttaatttattaggtagggtttgtaagttttttttagttgtacgaaattatttggatttaatgatttattttttttaggatatgagtttgggaaaatattaggttagtttttttttagtggtaaaatttttaggatataaaatttggaaacgttttatatttatgtggaaaaaagttggtttgtagggaaagatagaagagaattgatcgagaaagaggagtaaaaatgaagatggtaagaaagttttggtagaatttaagtatttagattttgtgatttttaaagttttattgtttttttgttttttttgttgtttagttgtttaatttttttttgtattttatgagttatttttacggtttttaattattttttttatattgtaatggtataggaagtttaatagtttatatttttgttatattattgagaagttatagttgtgattaattgtttagatgggtattgttttataatttttgtgtatttagttatttattttgttttttaaattttattattgggtttgtgaagttggattaggtattggttggttttaattattcgggaagtatgttagagaggaaagttaatggtataaagaatatttagttttaattttatggttaattgtttagagatatggagatgtatatttttggattatgtatatgatttttttttttggtcgtagaaaagaaaaatagttgaggtgtttaagaaatagatttggatgaatagtaatgagtattttgtttgattttaagttttttaaatggagttaatttataaattagatgttgagttatttttgagttgtttataaagatagaatatggattttgtaaaacggtttatttaatttaaaatgtttaaaaaatgataatggggtttatattttttatgttaaaagttataataagttttattttgtgagaattatttgggttatttgttataagtttatttgatggtaagtttttttggaattataaattatgattatttgatttttgataagtaggtttaaataaggtgttttattttgtttgtgtttgttaattggtgatggttgtttagatagtttagaaaatatagaagtaattttgagtgaattgttttagggagatatgtgaaagaatttttagtttaagtaattttattatttttacggatattaaggtagattttgtagattaatttttttttttttgtgttatttttattgtttttttttattagtattgagaaattattttgttgagtattttgtatatattgtaatggtttatttagttggtttttttgtagtttgttagaagagaatatatttgaagttttttttagaagtaatttgttttttttttagttataaattttttttttgtgtaatttggaaattttttttgattaagagtatatgattatatatattgtttaatatatatttgatgattttatgattattttgaggaaaatgtgttgtattttgagagaatttaagaatagattttttaagtttagtattgaatttttgaaattttagaaatgtaaacgatagttttgttaaagggaatgtaagtttagtgattttaaataaagattggaataaaatagattagtttgtgaaaatttgtttttattattggataaatgtatgattttggaaaagttaattaatatttttaaatattattgtttttatttataaaatagggtttttaataatatttgtattatattttgttatgattaaataaaaaatatattttaaaaatatagattattttgtttgttagtgagagtggaagaaaatttgtttttatattttgttttttatatattgaattaaaatattttaatattttttgttgtatagtagagtagtatttgtaatttaaataaatgtaattatttttaattttgtttaattaagagtattatattaattattgatttttaggagttatattaattaattatatttagatagtagttaaaagttattagttttttattaattttttgaatttaggtaagtttgtaaaaatgaataatttttcgattaagttattagtatttgttattttttagttgttattttgtataatattaaagttgtgattggtgtttttagtgttgagagattgatataattaataaataattatagacggatatgtgaaagaaaagggaataggaaagtattagtatttagtattaataggatgttaagatattttaagttggtaaaagtaggagaataagtataaaatataattaagataattggttattataatattttgataattttaaaagttttaaaatttttaaaataaagaatggtatatgtgatattattgtaataatatatttattttagatttttgataaataagatgaataagaagtggagttaagtggtaatttaaaggttgttgtgacgttttaagtgagaagttaagagaatttagattgatatggggtggaaaaaggtttggagaagtggatatgagggataatatgagagatatattaataagataaaggaattatatgaatataattgataaggtaaatgtgatttttaggtattatattttaatttatgagaaattgatgatatggaaaagttaagaggaaaaggtacgtttatatttgtgttgttatcgttttgttgttattatttttttttatggcgatgggtaggaagtaaaagtaagaggtaatttatagaggaaggagtttaaaaagtttgttatatttattggaggggggatagaaaaattcggtttattattagatttagtaaagaagtttgttttatgatggagtttttgggaagagaataaaagaaaataattttttgagtgagataaattaaaattttagttttgtaggatgtaaattttaaatgtttattgtatttgtggtatggaaattttaagataaaaaaataaaataaaataaagattgatttagaggtttgaaatttttagattttaggggaatgtaaaattgttttatagagtataaagggttttaagagagaaatttattaaaagttataaattataggcgaggtgcggtggtttatgtttgtaattttagtatattgggaggtttaggtaggtagattatttgaggttaggagtttgaggttagtttggttaatatggcgaaattttttttttattaaaaatataaaagttagttgggtatggtggtgggtatttgtgattttagttattcgggaggttgaggtaggagaatcgtttgaatttaggaggtagagattgtagtaagttaagatcgtgttattgtattttagtttgggtaatagagtataattttattttaaaaagaaaaaaaaaattataagttatataaagaaataaaatatagtagagagtagttataataataaattaggaatttaagaatgtgaaattatagagtaatgtggaaaaaattagataggtatatttaaaatagatataaaagaaatagaaataaaattgaaaagttatatacgaaaaaaatatatatataaatttggaagagaattataaaaatgtttttaaaaatatatttattgaatttttttataagaaataaattaaatagtaaattagatatatttaaagaaataatttatgaattataaggtaaatttggtaaattttaagaagtgtgtgtttatttttataaaagaaaataatgataataaaaataataataaaattataattatatttttttaaataatttttttataatattaattttttaggaattaaggtgtgatatttgtgagttatattttttattatggggagggagaagttttaaatataataaagtaaatatgagagttatataatatggtaataaatttgatttatttaatgttaagttattgatttgaattgtgtttatagtgaatattaattaagaatgtaattaaataagatgttgtttgttttttttaaatttgggatatttgaggaaattttattgatttagatttttaattgaggtatttaggaaagtttgagtattttttttttttttaataaatttttttgtagtatttgaatataaaaattattttattgattttgtaattgaattagaagtagggttatttttattaaaaattgtttttatagtttttaaaaatttaaagatttttaaaagggttgaagttgtaagaatttagaaaataatgtattaaatatatttggtgttttgagttaatttaacgttatgtttttttgttatgtgttttgtttttatatgtatggtaggttgttagatattaggagtatgttgttatttttgttatttttaattttttttttttaagttaagtacggtgtttttggttaataagattatttttttaatttaaaaaaaaatttttgttttttaatagggaattataagggaatttagttagttataaaagtataattgtttaggaaatgtattaagtggaaggtagatataaattaggttatagtgtattattatttttaaattatttaattataaattgacgtattaatatagattaatattaatgtatattaaagtattatatttatatttaaataaaaatgtaaaggaaaattaattagttgaaatagaaattaatgatgataatttttaaagtagtaagaatgtatttttgagaaagattttagggttttgtttgtttgtttgttggagattaaattattttttagtaaaattgaagggggaaaaaagattaacgtttaagttataggaagatgtggtttgtttggtatttggatgttttttgtagaatttataagtttattttttaggggtttaaatgtttttggatttaaaaagttttcgggaaagaatttttttaagggaagagatggagagttatataagtagaaattaagtttgagttttaagttttggggttgtaagaaaagaataagagaataagttaaaaaagttgtttattaaattttttatagaaggggaggagggtaggtgttattattacgtattttgaagtttttgttatagggtattggattgagggaagttgttagatattttttttattttaaattatttgtaattttagtagttcgattaaaaaatataatttcgtaagttgatggaaagaaacgaatttggtgaagaaagcgcgggaaaatattggttaaattagtaagaaaaagatcgtaataaaaaagaatttaaagcgtgagaattgaaattaggaagatggtagaatgagaagtagaataatttgtttttttttttttgattgaattaaatgtaaagatattaggtggtagagatgtggatattagtttttatagtattttttaagagtgttatggttttttttcgtttttattttatgttttaggtattttttttagggttttagttaagtttttgtttaagtatttgaataaattagatttatttttgaattagttttaggtgttgtttatagatattgttatggtttatatttggataatttagtttggtttttttaatgttttaattttttttttatgatcgtgaaaaaaatgtaatgagtttttttgaagaaatatttaagatatataaatttagaatatttatagtttttaaattaagattgtattatataaaaatatcgatttttttaaaatgtatgaatgagtgaatgagtgtataaatagttaatagtgtataaatgtatgtatgaatgaatgaatgagagtataaataagtaaataaggaaatatatttttaaagtatatgttaggaaatggataaattacgttttatgaagttttagattgaattaggtaaatagaattgtagatttttatgtttgttatgatttagtgtatagttttgggaaaattttgtaatttttttatattttagttttttattttataaaaggagtatattgtttgaaatttaatttttttatagtagtgagagttttgatttaacgtttataaaacgttttttagtttttttgattaataggtaaaatattgtggtagtttgtataatatattttttaaaaaggataaaggtaattggtcgaatttgatgtaaaataatattttatttaagaaataaatattagttatatttattatttttttattttatttgttaagtaataaaaattatttttaatagaaaagtattaaattaatatttaagttagttgaagtgttattattataggttttatttacgttgggggaaggagagttgttttgtttttttaggttattttatatgtttatatggtaaagttaggaatgttgggtatagttttgaaggtttttagcgtatttattggtttttggtattttaatgtattttatttttataattataaaagtatttttgagtgtttttggaaatatataataaatttttaattaatttaagagtgttttaattgtatatatgaaattttttgggaggaaaatattagttattttatatatatatagtatttaagttagtaagagagttttttttgaaaggtataaagtagtttttttatagtaatataatttttagttttatatgtgtaagttttattgaattttttagaataataggaaattttgtaggaaaaaaaattttataaaaattgatagttatatttatttaatgtaagaggaatatattagttattttgagttggattattttttaaaggtattagataattattgaagattaattaaaattttaattaaaaattataagaattgaatattttggagatagaattttttatatataaaaatcgaataataaaattaattgattaatatattttattttaaaattgtatttattagattattttagttagtatttgagtagtaattttttggattttgatgtattaatttttatttttatattaaatagattataataagtaatagatttataaattagttattgatatgatataattgatattgtgatatgtataataatatttattaatatatttataatggagtaatgttatttattatttatataatgtttatattttttatttttatgttaaaaagttatcgtaatatatgtaaggtgtttagaattgtgtttggtatagagtaggtttttattagaataataatatattattttttataagtttttattaattatatgagagttagaattattttttttaataattttggtaaatatttgatggtattaagtaaaaaaaaatgtagtgaatataatattattgatttatttttttttaatatttgggtttacgaattataagtaaatataatatgtatttataaaaatgaatattaaatatttttaagtgagaaattaattatataaattatatgtatatattaaatatatatcgttaatagaattatttattttaattatagtggagtatttcgattattatatgagttttaaggaatttattattataattattttttttaattagagtataaataattataaggtttaattaagttgaaatttttgtatttggtttttgtgagaaagatgagaatattattttaaagatgtaagatttataaatttttttaaaaagtattttggtattttttatggaaaatgtatatatatatttatttattaatattgtatttagagttttatttatagatatttttggtagatgtacgaagagatataaaaattattagtgtaatatatttagtaatagtaaaaatatggaagtaatgtaaatatatattaagaggggaatagtgaaattatgaaatatttgtatatattaaatagaagtatttaaaattatatgtattgatgtggaaaaatatttaagatttagtagattaaaagtaagttttaaggaaattaatgattttattggagttaaaaatgtaaaatgaaaataaattatatttttatatagttattatatttatatatatatagaaaaaaaaatgtttgaaaagatgtatatttaagtataataatttattttgatttgtagagaataagaatgagtaaatttattttttattttaaatatattcgtatttttaaaattttttaagaaagtataatatatgtatagtaaaataaaatatataaattaaaagttgattattgatgaatttttattgaataaatatttttatatgattagtaattaaattaagataaaagatataattagtattttaaagttttttttttgttttttttggttattttttttaaaagtaatttttattatttttgttttaatatgttatataaagtatgatttatttgtattttttaagtaatagattaaaaaaaaaaatttgttttagtagtatgaatttttttttttgaatattaaatatatttagtattttattttaagatattaatttaaattataatttgagtttttatagtgggttaggtattgaattaaatgttttttttgtatgaatttaattattttttataattttatgaggcgagtattgttattattttttatgtatatatgttggaattatggtttatagttatttagaaaattatatgattaaagttatatcgttgatgagtggtagagtttggatatatataaaggtagtttgattttagtatttttaattttttattagaaataaataaataaaaataaagtggtaagatgtagagttgggagtatgaagtgtttttagtatgaagttttttttttttgttttgttttgagtaaatgatttaaggttttaaggttatataatataatattttatttgtaaaatggaagggttaggttagattttttttttgatttgattatttgacgttgataaataaagtgatttattgaaatatagagtaaatatgttttgttatgatgtagtgtaattatgtattgtattatgttaaaaaatgatttatataagaaaataaaattataatttttgaaattattggaaataataattttaatttaatgttatttttggatataggaagatttttttttttaaataagtaaattggtggtttttgaagggttttgtttatttttgtatggaaaatgtttaaaaataaattattaaaaattaaataaaatttttttatttttttaattgtgtttgaaaaaaaagatgtaattttttttagtaaaaggttacgtatatttttaatagatatatttgggatttttggtttttatattttgaaatattgatataaataaatatagaatatgtttttttttaaatgaaatttataattttgagggttaaaaattttttaaaataatatgaaatcgattttagtagaaggtaattaaagagattaaggtttgtttttggagaaaattagaattatgaagattataaattttaacgagaaatttgttttttaaatgttagtttattgaaaatattaatgtacgtcggatatatttgtttttttattagaaaattagtaatattttggtataaatgaggttttaaataagttggagtagaaaataattaataaattagtttttatgattataagtaaaagagaattagttttttaaaaagttaataggatttattttttgtagatgtttggtttgggatttaatgttttttaaagatatgtatggaatagtgtagttatttaatttttattaatatttttaggtgttgaggttacggagggaaaaagatatgattttttttttttgtgagtttatagtttttttagaagatagatatatataatgagttttaatataatttgttgttatattaatagtttaaaaaaagtgttatggtattatatagagaaaagaattaattttgtttgagttttaaggaaggttttatagaggaggtgatatttgagttaagttttgaaagatgagtagattattattattattattattttgtttaggtaggtagtaaaagagtattaggtaagtaggttaagggagttggggttatggaggataagggtggtgagaatatgttagggagaaaaaaggaagtgattgacggtattataagaaataaaatgtttataagtaagttttattatattaggatttattatataaagaattaatttgagaaaggagatatgtgatttgaatattttgtggggttttttgatttatgaatttaggaagtgtttatttggaaaaatagaatttttgggtttttggtcgttttttagtaattaaagggttattaggtttttcgtttaatatttggtataaagtgtttggatggatttgtggttcgttgtgttttttttggattttttgtttatgaatgaagtagaatttttttttattatttgtgatttaaatttttgttttaaatttttcgtaatatttttcgagaacggtttttatttgttattgggttgtttagtatttattttatttttttgttaataaggagttatgtagggtttttttttatttaggaaatagaaaaatattttggttaaatatagtatgttgtatttgtagttttttgttatttaagtatatattttaaaattaaagtataaattaaaggaagtgagagagagagagtgagtgtgtgtgtgtgtgtgtgtgtgtgtgtgtgtgtgtgtgtgtgtgtgtttttaagtatttttattttgtttatttaggtattaattagtaaatgatgtgaaatttttaggttagtttgattgtttttatgattatttatttaatataattaaagtataattattaaattagataatgtataagtgtggaattttaagtatttttgtaatttttaataagataaaaattatttattgtttagaatttttaagaaaattagtttaattatatatttataatattaatgttttatattttagaataattttgaaatttaatttaaaatttatatgggaaaagttatttttttttattttatgtgaatattattgtttttattttgtttaagtgatttttgaaatgtgttttatatatgtttaaattatgtaagggtggtgtttaaataatagttaaatttatttatattaattatatattattttatagataaaatgtattggttaatattaaatttatagaatgagaatttaaaagtttggatttgagaatttataaaagagagtttttatatgtaatatatttatttttatttttttttagttgtataaatgttattaatttaagattttgaatttgtggttataattgaaagttatatataatttttttgaaaattttttattataaataaataatttaatttattaagtattttaatttttagtagttgtgattattagtaattttattttttttaatattatagattaaataaaataaaagttttttattattgaatatttatttatagaaatggaaaggtaatggttattatttaaaaataaatttaaattatttattgataaataatcggaagaaaagatatatagatgatttaaataaatatttattttttatatatttttttttaggtattttgttatttttatttatatattatttttagaaaaggaaaatatgttggagatggttaatttgtgtgaagcgtatttgtaaattttttttgtgtaaagttaatttattaatatagattaatgagaattgtttgattttatgtttaaatttgggaggaaggtattaggattttttatatttgattggaaatagaataatttttttatgtagagttttgggagttttttgattatattaaatgatattaagatttgtttaggttatgggtttttaagaagaggtaattttgtttttagagattatttgataatgtttggagatattattattattaggggagggagggtttttggtatttagcgatgttattaagtattttattaggtataggatagtattttttgaataaattatttagtttaaaatgttaataattagagtttgaaaaatttttatttaaatatattgaagaatttaggtataacgttattatttttaaaattatatagatatatttggtagtagttttagataagttgtaaaaatgagattttgataattaatattttaattttttttttttttttagttttattttgttatatagttattatatttgaatttaagtgataaattttgtaagtagaggtattaattattttttattgtttttttaaaggtaagaattatagtaatatgtaaagttattttttaaaaagtttatattgagtttattaggtttattgattattgaaaattatataaatttttataattggtattttacggttgaaaaaaaagtaattgaggaaatttaaatattggttataaagtattattattatataacgtgtttataattgtttaaagtagttaaggaattatatagattaaagttttaaaataatttagattattgtatgcggaaatatttattaaaagaaatattattgtataacgtaaatggttaatgttaattgttgagtatttatagtgtttttttttaaggttttaaatataattttagatttgttaagatgatttatagtatttaatttatatttggattattggatattttatttatggttattaatttatagttttttaaaaaagatttttagttttaaatatttttggaatatttgggggtaatttaatgaaagatatttaattatagtaataataattgatatttatattaagtattattttaaatatatttatatatatttatttattgaatttttattagaattttatgaggtatgttttgttatatatgagaaattgaagtaaaatttgttttagtaatgtgtttgatgttataaatttattaatgttagagttgaggtttgaatttaagtgtttggttttatatttttttttttttttatttatttatttatttttgagatggagttttattttgttgtttaggttggagtgtaatggtgtaattttagtttattgtaatttttgttttttgggtttaagtgatttttttgttttagtttttcgagtagttgggattataggcgtttattattacgtttagttaatttttgtatttttagtagagacggggttttgttattttggttaggttggtttcgaatttttgattttaggtgatttattcgtttcggttttttaaagtgttgggattataagtgtgagttatcgcgtttagtttttatattttttttatttatttattgtgttataagaattgagttttttagattttaagtattatgaaattatcgtatttttagagatttttaggatttttggtttatttattagattattgattttttagtggtaagaaataaatatatttttatatttacgtatatatatatataatttaagtttggatttatagttgtaattttattgggtttatattaaaattttttgaggttgttattgaggtagttttattttgtaatagttattgttttttttattgtttttagttttaaggaggggatgtttagtgttataatttttgtttttatttttagtatttttatttatttatttaatgggaatataataattatttattgattatatgtttagtagtgtattgtgtattagcgatatagaaatgataaatatagttaatttttttagtaaatttttagtttaaagtaggatttagattaatgtaatttattatattttaatgtggtaagggttatgttaaatgtagaagttggatgttttgggagtaataagaaagaaacgtttaatttagattttggaggttagaggaatttattagaggagttaatattttgtattttaagtattgaaaaagtagtagaaaagatatttgtagggggagaggggcgatgttttttagagaaaaagtattttacgtataaagaaatgaagtggaaatgtttaaggtgtatttgagaattgtagttttttatatagttggaaaagagagttgttgtgagtggggagtgagagatgagaagagtaatttgagtaaggtttttagtatgaagggttattttttttgtagagaattttggaatttgttttataggtagtaggtaaattttttaaggaattttaagtttaggagggattttataaaaattatgaataaatgtggttgaatattttagggacgtgagagagtgttagagatagttttaatatagtttagaatgggtttttaggagaggtattaagatattataattatatttgttatgataatattaatacgaataagtgtgtataggataattgtttatttaaagttaatttgaatatttgaggattagatttgtgattttggttataatgattttttttttaaatatttttgggaatggtatgtaaaaatataagaatataataaaagttttaaagtttttaaagttatgtagagtagaaaagaaatttatttattttattttaattttgtaagtttttagtaatattgataaggaaaaagtatttaataagtatttattaagtatttataattttgttaattatttttatgaacgaaatttttaaaaattaaagttaataattaagggaaaaaattagatttaaattaaaattttttatgagttaattaagaaaaataatagtattattattttattaattaaagttaatgtaaaaataaataaataaaaaaaaaaataaaataaaatagtagaattgtcgtttttgataggtttattgaggtttgtatgtttaagttatttattagaagtattgttttagattattggaaaatttgtaaaaggaaatttgaatgtgatttatttataacgttattaaatttagtaagaatgatttgagttataatcgtatatgaatatatatttgtatttaaatgtaagagaaaagaattaggtaatgtagagatttgttgatttttttaagttattattatttttaatatattgaaaatattaagttagaaatatttaattttttaattagaatattcggttttttttaaattttttaatattagggagtttaaagttagaggtgaaatgtaatgaatagattatttcgttgggtatatgtagaggtttgtgaattgtatatatgattttgtgtataatgagttttttcggtatgtggtatatttatttgattagggatagaattttaaattttgtattgttgtttttgtgagtagaattaaatttaatggtatatgaatgtaaatttttatgatttaattgtagttttttataagaaatgttttttttattttaaaaagaaagggggaaaggataatagaaatagtagtaataatttacgtgaaaatttaaagttatgttaagttaggttattgttggtgtttttttttatagtttttaaaggaggaaagatgttttaattaataaagttaatttttgtaggtataagttttttgtgttttatttagatttgtaattatatatagggaatattttgattagttttaatttttttagtgttaaatcgaatttgaagattggttaatacggatatttaagttatagaagggagagtagatatatttttttgttgatatgttatattgggagatattttatcgtatttgatagtttgttttttagtgatgttatatgaatatgttagggtaggtattttgaattaattttttttgttagaagatttgaatttttttgtagtagtttttatatattgaagatatttagagagaattttagaggcggcggttatcgtgagagggtattgttggtgagttatttttaggttatttatattttgttttatttagagtagtggtatatttttttattgggtatattattagtttttatttaaatgaaaggattcgtggttgagtatataagtaaataaaaaaatgaaaattattgttttagtggaaaaatattataaaattgtaaaataggttattaatagtaaaagtatttatttatagaaaattttatatatgcgataattagataaattgaatgtatttttaaaatatgggtagttttattataatttaaatttgtttttagaagtttattatgtattttttaattttttaagttttattagttggtttaatataaatgtgtagatttgagatttaaaattagtattaaaataataaaaaataaaaataaagaaaatataaagttgataatatttaattaatttggataaggtttgaagagtaaaggaagattttatatgttagttaaatatttaaaagatttggttataagtttttgataattgggaaatattataaaatatagtatttttttaaatttagttatttgttgtttagtttttatgattgtggttatttaggttatatttttgtttattgttatttaatacgtttttttagatatttaattttttttttttgattttaatattttgtttggttttgttttaaataatattgtttatgaagttataggtttaatataaaatttaataaatttttttaatatttagttatttttatataaaatataagtattattaaaataaaatgtttaggtattatttaaaaatggtggtatatgattgatggaagtaagagtttagtatacgtttaaggataagggtgttggttttatattggggagttaggattttggttttattgtgttgtatgattgggttttagtttttttatttgtaaaataggaataataaaagtatttaatttacggtatagttaagaagattaaaattagttaatttatataaatgtttaaaatagtgttttgtacgaaatttttgagtaaatgttagttatgatgttatgatggtgatagtgattaatattatagtaataatgatagttaaattgtaattatttaaagattatagtgattatttttatttaaaaatatattttaggatataaatatatttaagaaaatatgtttttatatttgatatttatattaatatatgttttggtgatataaaagttattttatattggtttaacgtaattttattttgaaaatatttatgtgataataggaattagattttgtttaaaaattataatttaaataaattatttgtgtagaaaaaaaaaaattaaaaaattttaatacgatagaatatataggttttttttttattgtttaaaagtacgttaaaataaatttatttattgtatgtaaataaaagttttaaaaatatgaatatattgtattaaaatattttatattggaaaaaaatgagaatttttggtattttagaatggtgtttttttttattatttatgtattgaaattttagggtaagaaaagggttagattaattttgaaaggttttaaatattaaattatattattgtgttagtattttaagattaattagtattttttaatgataaaaaaggttatagtgagatttagaggtgtattttttgaaattgttttaaattattatataaatgtggttttgataatataaaatggtttttattttaaattaattagttttatttttttttttggaggtgtgaaaggggttaggggagtaagaatagtagtgtttatttttagtatttttttattaataaaaagatggatggagaaatattaagaatgataaattttaagcgtaaaatgatatattattaaagtatatattaatgtatagttttataagtaatattgagtgatagtaatgtttataaagtttttaaattttttaaaagtaattaaagttgtttgtattttttttgaatgtgtaatttttgtttatttttttttatttaagtttaagttaaatgacgttaagtttggttttaaaaatgatttaatgattatgtagtgttttttttattaaaatatatttaattataagatgtagtattatatatattgtattttatttatttttagggtaaatgtttgaaatagtatgttattttttagtttagtaggaaaaatttatgagagaagtaggtatattgtaatgttattttatttttttggtgttgattttttttatttagtaattattgtaataaaattttttaattgtatttttgaatataattagtttaagatattttatagggaggtacgttataagagtttagtatttagtatatgtaagaataatatttatttagaaaaagaaattgttaagattatatttttattgaaaaaagaagaaggtgttttgatagaggtttgtttagttttttaatgagaggatttaaaacgttttttatttttgatagtatatttttttatttattttttaaataagtgatttgaaatatttataattagatagtatttaattttaggttttaagtgttttaatagttttatgaaatatgattagtagttgtaatatagaattatggtgaataaattttttataaagaggggtttgtttttatagaatgtttagtgtttttgtatttatttaatagaaaaaaatgataatgagaaagtataatatatatttgtatttttaaattatttaatatttaattaagtagtgaaaaagattattatttttttttttgaaatttgtataaaaattgtgagtttttgtggggtaaaataagtttgattatttgaaagttagaatgtgaattttttaatattttaattttttataataatagttatcgtttttttgttattttatttttttaaaaattttaaaaaatttaattttagtgtataaaatgttaaaatgaaatattaagttatataaatatatttttagatacgatattagttatttagagtttgtaatagagattgaaaatatgaaattggatattttatttttcgtggttatgtaaaatttatttatattttaaagtataatataaataaaaaggaaatttttagaaatggagtatttgtttttttttttttttttttaatttaaagagttttattaaaagaaaaaaataaattatagtaaaatgataagtaatttatttgttagttattcgttaaaaaagaaatttttatgtaatttttttttttagtttttagaaattttttgaaatttagtatttattttttttaataattaataattattatttttttttatataattatttttttttatataaattttaagattttaaaaattttaaaatttaagtttattatttaaaagaagtgttaattgtgagtatatatatatatgtgagacgttttattttggaaatgagaaatttaattttaaatatttaataaatattaataaaaagaaaataattgagtaaattttattttagttataattgtgaattaatcggtagttataatggtttttaaatattgaaatatattatttttaggaaatttataaaggaaaataggtttttgaaaattatattgattgtagatttttatttattatgaaagataagtatatattattaataattagagaaaggagatatttttaataaatttaattatgttgtttttaaagttgtagttgttaaaggttttaatatttttgtatagttatttttaaatacgggtttaattttgaatgatttataatttttaattaggtggaataaattatttttacggtttataataataaatgtgggtgtagttatgtttgttttcgatattgttgttataaaaattagattttggtagttttgttttatataaaataatttgttttttgttattattgttttttgttttttgggataatgttatttttaaaaatatataaatgtttttgaatgtagttttttaaaacgtttcgtattacgtattaaatattttttggggggattttttttttattttttttagtttttggttttttaggtttaagtttgttaataatattttaaaagataaaaaaaaaaaaaaaggtattgattttgtttaaaattaaatcgtattcgggaaaggaatttaagtataattttttttttaaggttttaaaaataaaaataacgtaataaataaaaaaattatcgttaatttttaattttgttagttatttacgtgtaagtgaaattttagaagttgttgatggggagttcgcggttgttaaacgtttttaagatttttatttaaatttcgtaggagttcgtattgaaattgataaatattcgagggtttataaagtggttatagatgagaagaggaataaaatgttatattttaggaggtgtatttcgttttaataattacgttgattttagggtgttaagttaaaaggggtaagggagaaagaaaattgttaagtatgagtttttaatgtgaaatttaatttgttggtttttttaggtattagattttggaagtgtttgtaatgatagttaggaaagtaaattaatggttaacggtttattgggtttgaatattagagttttgttatttttttatagattaagtatataatatatatatatatatatatatatatatacgaagttgttttacgtggaattgttttggaattaaaatatacgttcgggcgttattttgtattttggtagaaagggtagagggatttgtattttttttttttgtttttaggttaagatttatgaatgattttttaggttcgttcgggatggcggggagaggcgtaggagacgcggtgagagaggatagtttttatattattttttcgtatatatttttattttaggcgtaaattcgttgtttttataggaaggagaaagaggggtggtggtgaagggaaatattatttttttaagtagggaagagatgataaaaattaaattgcgttttttgttttcgttttagttttgttatcggattcggttcgtaaattttttaatcgtttcgagttgtttagaatttcgtaaataaagggagaaaatttttttaagtgttattaaacgaaagttcgggttgttgtgcggcgtagaataaaataagtatatatacgtttatttttaaatttcgttttattacgttaaaaattcgagttattttaagttttattgtttttttagatttagtaggtttggaaggagagaaaaatttgttttatttagttaggtttttttttttggagaagttataagttttttatggtattcgttattcgagttaatgaacgcgattgttttgataaggcgtttttaattttatcgattttggtaaattgtaggagatatttagtttacgttatataaaaattattaaagtgggatcgtcgtagttgaaaagttcgattagtgtttggagattagaacgcgagtttttaaagtatatacgtattcggtatcgggaaagtttaggcgtttgtgatttttcgaaggattttgggttagtattttcgcgtttggattatttagggggttattagaaagtaatatacgttataagaaagatgtgggggagatttcgatgttcgcgtttttgttaggtggaggcggggtgtaggtagaagtcgcgcgttggattgttggatgaatttcgttacgcgtaggtttcgcgtcgatttcggaagggataggtaggttcggaagggatttttggggtttggggacgttttttagggtagagagtatcgttgcggttcgagcggttcgggtttttaggcgtggggtattcggtttttaagcgtttttcggggacgtaggcgtttacgtatcgtttagttgcgcgtttttagtatttagcgttcggcgttttcggcggagtttcgcgtattttttcggaaagtttgggggtttttttaatttaggttttttcgggagttttggggcgggggttggaagaaggggttatttatttcgtcgttcggttcgtttcgggttttcgaagtgtttgttttagtcgcggtttagtgcgttcgtaattaagtatttattttcgttttttttagtgtcgaagtttttttttcgcgttgtgtttttggtgaaaataggatatttttttcggttattttataataaatagcgtatataagcgggggagaagcggggcggagggagaagtcggtttcgagggggaggaggaaaggagaggagttaaaatttcggattgcgataggggggaaaggagaagaaaagaaaatgagagagcgcgtttagtcgtcgtagtcgttatttttcggtttttttcgtagttttttttttttttttaaggtagcgataattttacgtggataggatggaagttttgcgcggaagtcgggaacggtcggagcgtgcgtcgcgttgtcggtagtttcgtatttgcgtagggaggtggggcgggggcgacgtcgttatcggttattgcgggttcgtgaggtcgtcgggggtttcgggggaggtcgttagggacgcggggggcggcggcgcgcgggggatttatttcgtttttatttgatttcgggtgattgtttattgttatggtttgcgatttcgcgtggggatcgtttagggtttcggggttttggatgtttcgggtggcgtcgtcgtaattttcgtgtttttcgcgtcgtttttatttcgtttttattcgggtcgattcgagcggttgtagtttttaggttgaggggagggattcgcgatcgcgtttttttttttgggtcggagagttattgtcgatttttatttgtttttgtggggtagttttcggaattgtttggaattttttcgttatttagtttttttgtgtaggttattgcgggttttttgtcggatttttttttatttattttaagggaggagatagaagggatttcgtttatttgtaataacgtgaaataaaaattaatttagattagattggggcgttttttttgacgggaggaaatattttttttcgtggagatatatgttatgaaggattaagcggtttggggataggttgtgttgcgaagggtttgggttttttttagtgttgttgggtgtaggtataggtattcgttttagacgtttaaaggttaggtagtaacgatttatttttaaggcggcgttagagtttttttaggtatattgttgaaatgatatttcgtgtttaagttttttgcgtatgtattacgcgattatataggatttacgattttatatttatacgtgtgtatgttataattaggggatatagtaaaggtagacggaataaataatttataaattttgtatttatttaattattttttttaaaaatttattgtttattttagcggtattttttttgttatattgataataaatgttttaatttattgataaattattgagtgttaattattgtattggttatttatggtatatgagtttatttaatttttatgataattttacggtggttattattaagtcggtataaaagatgaggaaattaaagtttaaagaattatgagtgatttttttaaagataaatttagtggtttttaattataaagtttatgatataataatttttatattattttaggtgtggtttaagagattatagattaattcgtagaaattatttttatttaaagaaagtttagttttaatatatttattaagttacgttttgaaaaaggtttagaaaaaagattttattttttattttaggttggttttatgtaattgatatgagtattgtttaatttaaaagtagtattaattttgaatatttatggttataatttattttttaatgagtggggaattatttataatgtttaagaggttttagaaaaggtggtgttgtaaatttaaaatgataaaggtagtcgttgttgtttttattatttattgggtgtttttttttgtagatttattttggagggtgtaggtattgttaggtataatgtttttttttttggtttttaaggtagaaagggttttggtagtggggttggtataaagcggatttggagtatggttgagagtatattttggtttaacgaggaatgttagttaatatatattggagagaaaaatatgaatggatagatttaattaattttgtagatttattttttttattttatatgtgagaaaattaagggtttagaatttttagaagtttgttaataaatggtagatttgagttttaagttagtttttatttaagtttatttttagttattgtgatgttattattagtattaatggtatttagaaaaatagtaatttttttaaatatgtaatatattataagttaaatatgtaatttaaatgttttgtgaattatagtgtttaagaatgttttgtggttatagtaaatattatgtaaggattaagtataatgatgaatttaatattgtttttaaaaggtaataatattttgaattttattttggtataaaatattatgtgttagttttatttataaataaaggtgggagatgtatgatttgaataaaataaaaatttatattttagtatattgttaatataaatatagggtgggtttttttagtatgtttttttgtatttttttaaagttagattttttagttatattgattttgtttttaaggttattttgtttttgtatagttttttgtatatttagataagaatatatgtatagaaattatttttaaaatttaggataatatattagttatttgattttatattattattttttaatagttgttttaaatatatatatattaatatggatattattaggtgttagataaaacgttaatttttagtatatatttgaaataagtttaatataggaaatagaattttagggttataaaggtaaaaatgtattgtttgtttaaatgaggttttatttttagtatttatattgaatattatttttataattatagttatatcgtttatattattgatttaatatgtatttttaaataatttatttttattaaataagtttatttgataaaggatattttttatagttattataaatggaaaattaataaaattcgttatgaatagaagatgattttgtaaaggaatttatattgtagaaataaaagttattttttatgtattatttaaaattattttatatatagtttgagaaatattggtttaaagaattatattttatatgttttttaggtttattaagagatatttttaagttttttttttttataatcggaataaaatgttgtgtttaatttattttgaggtattattttttaaattttgtgtttatttaattattgttttttttgtttaaaatatatttgaagtttttgaagttgaggcgtttttttaaaatttatgtattatttattgttttatttattattttatttgtggtaaaatgtaaataatttataaatgtataattaaaaagtaaattatttttttgaaatattgtatcggttatttattatttttttttagtatttattagtttagtagtgtaatatagtatagataatgaagaagagagggaaagtagaatagtgggagaaacgtaaagggtttagaaagatatatgggggaaattgaagttagagatttgttgttagatttttgaagtgatttaaaaatattagtgggttttgtatgatatgagttaggtttttagaatatttgtatatgtttaatttagtttgaaaagggatgtgttttgggaggagtggggagataaaaaatataagattttatagggtaaattagtggaaatataagatttatttattagtaatttttttaattaatttttttggaatgggatgtttttgtagttattatttattatttgtttattttttaaacgtgtatggtattgttttggtattagattttgtataagttaaattaaataaagcgttttaggagtttataatttaaaatataatttttgttttaattttatttaaaagtaattttaagggaaaaattaggtttttattttagtaagaatagattttaggttaaaaaatgttataagatattatatttattgaaaaagaatgtagagaattggatgtttgtagaaataattttaaagtaaattttttgagtaatttttggtatatttatgaattttagttggaaatatatataattttttaaaaatataataatttagttgttttttagtaaattttaagttaaattatttgagttttggaagtatggagttttaaagattaattttaatgtgaataaggttgaatagttttttaatttatttttttgttgatgatagattataggaataaatgaagataaaatatgattgtttaagaatttagagttttatgttgtcggttttttaaaatttataaataaatatattttttgagtaattttgtgtagatagattaagtttaaaaaggtttttattagtttgtgaaagtgaagaaattaaatttttaggggatttgttaaatttttttatttttggtagggtttttgaaagaaaggaaatgtatattttttgggagatagttttattatatttatttttagatttttttttgaaaattttttttagttgaattattttagtagtatattaggtaattttatttttttttttatgtttatatttagtttttagatgtttataaatagatattatgtttatttttaagttatgttagttacgttaaataaatagaaggttttttaattttgtggtagtttagtttttataaatttataattatttttattgtttgtttttgaattatttttaattttttagatgtttatttttgttagaggtattttatattgaatgtattgttttaggtgtggttttattaatatattagaatgagttcgaatttatttttttcggttgtattatatttttgttttattttgaatttttattaatatatgttatttttatattttaataatttatatgtaatttttttttttatttttattttatataatattttttttggtatattaattaattttttaagtattttgaatgaatattttaaaatattaataatagttaaaatatgaataatattatttttttgtttttttgaatttattagtatatagttatttgatttttttattttatttttttaaaaaaagtgattagtttttagtgtatttattttgtgattttttttaattttagaaatattatttttgtttttatttttttattgagattgttgtttttaagttattattaatggttttttattagttatttttgaatttttagttttttttatgtttaggaagtatttggtattat

SEQ ID NO: 473 - DNA, 26997 bp, Artificial Sequence
  chemically treated genomic DNA (Homo sapiens)
aaagtggttaaaagatggtaatatagggagttaagtgatgtattaaattttgcgtggttatatgtgagggaaatttaaggaagggttttgtattggattgtaatgggattaaaattgatagaaaaagtaggttattgattgaagatgatgttggttttttaagtgaatgatttttatattgtgttgtgatagtagtaaggatttttttaagatttttttattttttattttttattttattttatttttttgagatggagttttattttgttatttcggttggagtgtagtcgcgtgatttcggtttattgtaattttcgtttttcgggtttaagtaatttttttgttttatttttttgagtagttgggattataggcgtttattattacgtttggttatttttttttttttgttttttttttggatttttgtatggtttcgattttttgaatttatgatttatttattttggttttttaaagtgtttggattataggggtgagttattatgttcgaattaagatttttttttttttaagtatgattatgattatataatttttgttttatttagttgttttatttgttttttataattattaaataattatagtatataagatttgaaaatattgaaggtgggtttgataatttaattttcgagaggtttagttttggttatttttttaatttttgaaaattacgaaaggattatggatgtttttgtttattttagatgtgaaatttatttgattatttttaaagatttttttagttttaatattttattatttttaaatttttaaaagaggttaagtatgatggattttttgtattaataatgtaatatttttatgagttataaggattataaattagaattaattttgggtttttattttttaatattttggttgagaaataggtattttgtaaagtatttatttgttatagaaaggtattaggatttttgaaatattttgttgaaaatgttagtatgtatttaattttgttagtttttttttttagtgttttaatgtattttggatttttttttgtattttagttatttgaaaatagatgtatattttagagttataatatgaaatataatttggtgggatttttttttatttttggaattgttattttatgattaaaatttaaaggaatggtttttatgtgttattggtatatttcgtattgaaatgaaataattaatattatagtattaatatagtagtattttttgtttgggggtaatttgtttagaattatgtgtttttcgtaagttatttaaaaatgagtttggtagtttgttatttgtttgatgggaatattttaatttttttggagttatagaaaaaaatattttatatattggtaaatattaatttaaagtttaggtttttttatagtaatatagaagtaggtatatgaaatgattatgttatatatttgttagattttgacgtttaaaatattttttgttataaagttattgaagtagattttaagttttgtggttggttagagtttttgtaataataatttatatatgttaattaaggtagttgtttattttggtcggtaggtaggtaggtaggtaagtaggtaggtgagatttgttagttataaagaggaggagttaggttgtagggaaggagagatatgttagttaaggttaggaagttttttttagagttggagttaaagaatttatgtggttttgattagtagtttgtgtttagtattttttttttggttttaattttattgggttagatttttttttttttttgaagttatagggttgttaggtagggagggttttatgtagtagcgtgtgtttatttaagttttaatcgaagggatgatgaaatttgttaatagttaagttaagtgggaggataaagatgtggtagggttgtgttttggtttgtttttgaagagtagtatttaattttagtgatcgttgttgtgggaatgggtttgtgaaaattttttagtttttttttatttttaaaatgtgtatgtgagagagattttttttatttatttgttttttttttttgagttgtattttattttaggtgtttagtagtttttgttgagtgataattaataaagtttttggggtatagtttgggttgttttgtttttttaaaatgtggattgtattttattttttttgaagtgtttattttgaagtttttttatttttagaattttttttttttaatgaataaaagtaattgaggggttgtttttaatattttgaattatatttttttttttatttttgtgtaatattagttgtgagaagaattttaagatgtaaaaaaaggaggtatgttttttttatttttagtatttttgagggtttttttttttttaaatcgattttaattaattttgatttttttttttagaaaattatgtgttgaaataatgttttgttagatgtgagaatggatttttttttttataaatatatatttaagttttattttagttttaatattttggttttttttttattatttaaatttatattatatttttgtggttattggttttgtttgtagaagtaagtttattttattttggagaaatattaatattttaaagttattgtttgtttgttattgttgtagttattttttttttagtttgtaattttaaatttagtttgttttttatatatataatttgttttcgttaatttttgatataaattatatatttgtttatgttttttattatgggtgagttaaagttaatattatatagtgtgttatttttttgcgagttttggtcgagttttaggtttaggaaggagagaggtagtagttattagttttgttttttgttttgagtttgtaaaatatattagttagtgttattatgggaagggagtatttgttttgtaaaaattttttaataaggtttaatttttgttttaattagtatgattaagtttatggtgttgattttattttgaaatttatatttatgtgtttagattttttgttttggttatttaattgtgattggaagagaaagttatgaattttaggttttttaatatttaggatgtcgtttttgtattgttaatttttgtgttattgtttcgtattatttttggttgttgatgagtttgattttgttgtttatttaagatgattttttttttttgtgtttgattttggttttttgtttggtttatttgattttttggtatattttgtattattgtttggatagtaggtttagttttttttagggtgttatagggttgtaattttatagatatttatggagtttaggatgggggtttttgttttagtatagatatttgattattattttgagagatagaggtttgagtttgttttgattttttttttttgttgatttttagtgtcgtgtgtttggtaaagaagtttgtgtatttgggaagttaaggaaaaaatttggttttgggataggtggaggatcgagcgatagagtagatgtggagttgggggtgattgttttttaaaaattttgatttttttgggtggagaggaagttttttattttagaagggttgtttttagggtgtgattattgatgggaagtatttttatttatgtaaaggttattttagagaaggggaagagggtgttaatttaaatatatgttttaaaggaaaaaaatgttataaagggtattatagggttgtgggggtaaggagaaggtagatggtaatatataagttatttttattattaattttttggttgattatggttagtttatttaagattagttttagatttttttgggttttagattttttatttggagatgataagtttggattggaagggtttgcgtagtttatatttttttgttttttttgttttgtttttaaagtttttttttttttttttttttttaaataaaaatgtgtggtttaattagtttttgttttttattagttgatgttaatattgaggatgttaaaggattaatataaaaatgagtatttatgtggaattttttttgtttgttataagaattaaaattggattgtattataatagttttgtgttattgtagtataagttattatttaagtcgttgaaattttttaaatttgtcgttgtttattggttgtagaatataaatatagttattggttaattatttgtttgatttaaaattacgaaaaatgattgatttaataatgataaattgttatttttttttattaaattatgtaaaagagcgaagatattaattgaaagtaaggggaaaaaagagtttgttagtgatttagatattttaaatattttgttgtttggaagtatttggatattttatagttttttttttttttttttttttttttttggtttatttattatttagatgtttattattatggaagtattatttgaaattgtatttcggttaataatttagagtggaaacgtttgtatttttggttggttgttttttggtgttttattgatttttttgtttttttttaagtttttttttcgtaaaatttttaggaatgtggtaattttgttagatgtttaggtgttggtttttagattttttttttttaatttttatgatcgttttgtattttgtttgtttgaattatagattgtatttgttaaatagtgatatatgtaattggatgttttttaagatttttgaaatttaatttttttaagttgagattaaagtggatattttgttgttttgttatagttaagtttgggatgtttcgagatttgtataaaagtttttttaggttggtatttttaatttttattgtttcgaggaaagaaaaataagttattttttttttttgaaaggtagaaatggagattataaaaacgatttaaaatgtggttttagttagaaaggattttgaaattaataattttttgaaatatgattgtttgttggagtgttttgaattatgtgtttttttgggtatttaggaagttttattagttgtgagtgaggattagtcgttgtttgagtgtgtttacggaacgttatatttggttaagatagagatgatcgcgtttttttttagcgattatggatagatttttaagatgagtttacgcgttttttagtaggattggttgttttaatttttagttagggttattattaaaatggaatgtaattttagttaggtgaatggtttaaggtaaggagattttcgtttttttttttttttgattttttatttttttattttttgtaaaggtaaagtggaagttagttatgtttttttaaagattgatttagaaagtaaggttattgtgtttgtaattttagttattcgggagtttgaggtaggagaattatttgaatttaggaggtagaggttgtagtgagtcgggattatgttattgtattttagtttgggcgatagagtaagattttggttaataaaaaaaaaaaaaaaaaaagaagaagaaagaaagaaagaaaggttattgaacggtgacgttggatagcgttgggaaaatgtgttttttagtggtttgtgtagaggatggagtttgtaaaattagtagtatatttattaagaattttttttgaagatgtgtttaattttattttttaggtacgagggttttgtgggaggggagttttgtttatatatggtagaatttatttgaggtttgattgtttggaaaataatgtcgttttatgtttttataaagggagagtgttagttagtggttaggtagtgcggcgtatgtttaagttatttgaatttgttagtggatttttattgtttgttttttatttttattttattttttgatttttgcggttttttttttttaatgtttgttgtttgtttttttttttttttttttttttagtttatatataaagttttttttagtgttttttataattattagtttttttgagtttgttatgaatatataattgttacgtaaaatgtattattaaatgtagaattgtttttggtttttaaaaagtgttgaattttgtgtagttttgaaaagtaaaattaattttaattatgatttaatattttatatatatttaggaaaaagaatattaaattttaggataaagaatagattattttttcgaaatgttgtataatttattattaggttataagaatagtttatattttcggaaattttattgtgtataaagtttttttatatttagtagttttttagtttttcgagtagttttttatgaagtatatttgattttatttgatggatgaagaaatttgtgattaggtatttttagtttgattttaaattattatttaaatggaattagagtttggatttaaattaggagtgtttgattttatattttgagtattttttattttgttgaagttgtaatggggtttttttgttatatatatgttttaacgttaaaaaggtttattataagtgttatagtttataagtttggaaacggttgcgttaatttttagtgtggtgttaatgaaggtgttaagttatagtgttttagagggaatgttaacggtaaggttggacgtgttagatggggagatgggagatgttagaatatttttttattttgagaagttagtttgcgtttgtgtatttgttttttgaaagtgtattggttttgatgttatatattgttatcgtattggttttttaagtggaattcgaggtaggtttattttgaattttattaggagatttatttttggagttatagaaggatttgggtagaaaatgtaatgatgggtttaggatattaaagttgtgggaaattaatgattatatgtaaatatttttgaattttattaagagatttatttttggagttatagaaggatttggatagaaaatgtaatgatgggtttaggatattaaagttgtgggaaattaatgattatatgtaaatattttttatttataaattttatgtatttgatataatgtttttgttgattattaattatatatatttttgaaatatagaagaatgtagggtaattatgttttaaagaatgtagtagtgtttatgtagtagattagttggtggaatatagtttggaaatattgaatgaattttgttttgggtggggttatatgattttatatatgttagcgtgattacggcggagatattaagatcgggatatatttttaaagttttttttttgtagaggttaatttttatttatgagtaatttatttgtagggaggagggggatgttggaaggtggggagagaggaaggaaatattttagataaaagggtattgagatgattttcgatggataataggtagagtgagttatgttttggtttttgtttgagagtttggtttggggttagtttggatttagtaagttttcgaagggagattgagtgaggaggcgagaatagtgttttagaaatgaaagtttttattgtttttattgtgttattttcgaatttaaaataaaataagtattttggtcgggcgtagtggtttacgtttgtaattttagtattttgggaggttaaggcgggtggattacgaggttaagagatcgagattattttggttaatatggtgaaattttgtttttattaaaaatataaaaaattagtcgggcgtggtggtgggtatttgtagttttagttattcgggaggttgaggtaggagaatggtatgaattcgggaggcggagtttgtagtgagtcgagatcgcgttattgtattttagtttgggcgatagagagaaattttattttaaaaaaataaaaataaaaaataaaaaaataagtattttgtttgtgggagaagtgtaaatattgttttttttagtgtgagtttgtgatgttttttggtagttgatgtttttttttttttttggttaggtatggggaagtttttttagtttgtgttgtgattttaggggtataggttgggagtttggggtaattttgagttttaggtaaggggttatagtttataagaaagaaagatattaggagttttagtttataagaaagatattagggtagtttcgttttagggtttttagcgtagtagattggggaaagtttttgggtggtttttttgttaggtaagtgaaaggttggtgttgcgttgagggttttttttcgggaaatattttttttaggggaattggatatttttttttttttttattttttttttagatggagttttgtttttttttatttaggttgtagggaagtggtacgattttagtttattgtaatttttatttttcggggtttaagcgatttttttgttttagttttttgagtagttgggattataggtattcgttattatgtttggttaaattttgtatttttagtagagatggggttttattatgttggttaggttggtttcgaatttaatttatttattttggttttttagattgttgggattataggtgttagttatcgcgttcggttttgatatttttttttaaggaaataatgggaattttaagagttttttttttagggtttatagaattttaatattgtttagattgttgtcgttataaatttttaatgttgttttagtttttaaagtatcggtgatgtgttttggtgggtggatatcgagtgaagattattatgttattttttttatttttcgggtttttcggtgggttcggtgatgtcggtttggtaggtgttgtttatgaagggaataaggtggattttatttgtttttaatttaggtttacgtgttttttttgaggaaaagggtagttgggttgtaataggtaggggaggaatattggttgtagaggttgttttcgttttgaggtatttagtaatgtatagatgttaattagttattaagtgttatcgttttttatttataaggatgttttagggggagggagaggagtggttgatattaattttttttgtagaagagaaagatatagagtttatgttcgttttttttagagtttagtgtgttttttggtattgtgtttgggtgttggtttggtgtattagttgggattttttagagaaatagaatttataggatatttttatattttaagatatttatttgaaggaattggttaatgtagttgtgggagtgggtaggtttgagatttgtaggggaggttggtaggttggaaagtaggtagaattttttttgttttggaaatcgtaggttttgtttttaaggtttttaattgattagataaggtttatttatattatttgatattattttttttagttaagtttaattgattagttatttgtgtaaatgtttttttagtataattttagttagtatttgattaagttattgggtgttacggtttggttaagttgatataggaaattgatttttatatttgatttttagggatgttgtatttattagtgattggtgatttattgtattttttagatttttaaattagtgtgttttggggggttagtttatcgttgttgttggagtttagtttgattggatagcgggtggtaaagggggtggcgtgttaggttagaggtttattagggggttgtttaagtttagtgatttgaaagaattgaaatataagtggtgagttagtgttttgttattaataatttaacgggttttttgaaggggaatgggggaaaagaaagttgaatagttattagtggagttaagatttattttagttagaggttggaggtagttttggggtagataaaggattgtttgggattttattcgtaggttttgttgatttattgtgggtttttttttttttttttttttttttttgagatagttttgtttttgttatttaggttggaatgtaatggtataatttcggtttattgtaatttttgtttttcgagtttaagcgatttttttgttttagtttttcgagtggttagtttttatatttttagcggagatggggttttattatgttgtttaggttggtttcgaattttttattttaggtgatttattcgttttagttttttaaagtgttgggattataagcgtgagttattatgttcggttttattatgggttttttacgaatgttaggtgtagttttataaaagggaatatgggcgtgatttattttgttttattttggatatcgtgaattagtatcgggttgtgttagtttagttcgaggggttagggtagaggtagggtttacggagacgtagattttgttacggaggggtttatagatgagatgttgtagagtagtgtgtggttgtttgtttttggaggagtttcgttaggagtgtagttttttaacgttttattatttgtatttgtatttttttagattcggaagttttaggttagttgtgttagggagttagtttattttttggtttttggtttaatagttttttttaattgtttttttttttagtttatgtataatgggtttttttgtagtgtatatgttatttgaagttaagtttaaggggaagttacgtaagttaaatattattttttggttagaatttgtgggttgttatttttgtggtttttgattattttgtagatatttttacgggagaagtgtattttttgtagtttaggtttttttagaatatggtttatttttttttgtttagaatatttagtttgggaatagtgttttttgtttatttttatttatttagtatttacggagaaaaaggttatgtgttttgagagaaaggaaggatttagtttttaatcgaatagtggaattttataaaattttagttttaacgtgtttataagtttttgaaatgaaatataagtggtgaaacgagatttgttgttattataatagagtttttgtaaagtataataaaagaaaaataggagagaaaggaattattgttttgcgagttaattgggatgtttttgtgggtttggtttggttattgttagattaaatagtagtatttttgtagatagtaatttaattgtacgttgtgtagatataggatattattttttagtttcggtggtttatagttattttttttttttttttattttagttttacgtattagaaagttttaagtgtttatataatggagaattgttagtgtgtggttaaattaaaattagttgtttttttgtgttatttatattaagggtttggttgggagttttagcgtttgtttagtttttcgtgagttttttattaatgttttgaatttgttgtgaggtttttaaagtttaagttatgatagattagtaggataagttaagaggtaatatttgtttatttatggtttataagtaaattgttttttcgtgagtaggttggtaggtttgtgtagagtaggttgttttttttttatttgagtatttttagtttaggttagttagattataggtagtttatattaagtggtatttttttttttttataggcgatggcgatttcgtgaagtttatttggaggtttattgtaggtggaatttagttaatttatgtgttatgttgtgagtttttttttagtttagtttgtaggttatttggagttattgttatgtttgattttgttgagtgagggttttttcggtgtggtgatttttagcgtgggtttcgggattagtagtattatttttatttgggagtttgtttgagatgcggttttttaggttttgttttagaatcggaagagatttgggtggtagtttagtacgttgtgtttgaaggagttttttgcgggatttcgatgtttggtagtttgagaattattgttttgttgtacgatttaaggagatgaaaaatgagaaagtttagtagttgggtaaaggtgatttatttagcgaatgatttgggaggatttacgcggaggtggggttgttttttagaagtttttgtttgagttgagaaatatttttttttttttcgttatattggcgttttgtttagttgggtttgtgtagcgagagataatgttatttgggttttgtttttttttgggatagatttattgtatgttatgaataattttagtttcgggttagatagtaggatgttttatagatgttatttaaaaaatatgttatttgttatgtgatggagatgagaaaaagtagggagtatttgttgggtttattagggttttagatatattgtttatgcgtggagttatttatttatttaatgaatatttattgagtatttatttttttagttttttgggatagagtgataaaatatataaaaaagttttgttttattaagtttattttttagtagtgaagatggttatgatattagattatttatgaaaatatagtaggttagattatggtaaatgttaaggagaaaaataaagacgtgaagcggatggtagttttaaagaaggtggttggagaagattataaaaaagtgatgtttgagtaaagttgtaaaggtagttgagggagaatgttcgtgattaaatagtagaaaatattttaagaggagggaatgttaaatgtaaaggttttgaggttagtttgaggtgttcgaggataataagtaggttatcgtggttgttgtttagtgtttaagaagaagagtaatagatgatgagtttggagagttcgtggggttattgtcggattttgatttttattttttggtgagtttagaaattattaggggatttgaggtaaaggagggatatagtgttatttagattttgtagggtttttttggtttttgtgttgaagtttttttgagaaaatgtgggtgtaggatgggagatatttgcgtgagagtgggtgagagtggtagtaagggagggtgggagaggtagtcgtattttgggtatagttggaaggtggaattaacgtgttttgttgatgggttggatatatggtatgaggaaaagaggaagcgaggatgggttaaggtttggggaatgtattttaaataaggtacggataaattataattaggaatttttatgagtatagaggtttttttaagggttttttttaagtattattttagatattggggataggaatttttttttaataaatattaggtaaaataagaggtttttgtttttttgtttgagtttagtggattttaatttattagtttagtggtttttaattatcgtgatgtggtttttagaggtatttgttaatgttcgtgtttttgttggttatagttgggaggtgttattggtgtttggtgggtagaggtcggggatattttgtagtatatagggtagcgtttttgtagtttttatttttatttgtttaaagagtgatttggtttcgagtggtattagtgtcgaagttgataaatgttgtaggaaattaacgtgtatttagtgtttaatttgtattatggattgtgttagtttcgatggagatggattaagaattaagtgaagttggtcgggtgtaggtggtttatatttgtaattttagtattttgggaggttgaggtgggtagattatttgaggttaggagtttaagattagtttggttaatatggtgaaatttttatttttataaaaaatatagaagttagttgggtatggtggtaggtgtttgtagttttagttatttaggaggttgagataggagaattatttgaatttgggaggtagaggttgtaatgagttgagattacggtattgtattttagtgatagagtaagattttgttttaaaaaaaaaaaagagagaaagaaaaaaaaaaggaattaagaggagtttatggtttattaaaggtgaaaaagattttgtgagattataagatatatttagtatagagcgatgtttagggtttagtaataatagatatgagggtattattaattttatttgggtaggagaaaaagattttgaaagggataatattaatttatatttttaaaatttatatgatttattaatagattttggtatataatatattgtttagtttttttaaatatttatgagatgatattattatgattatttatatttacggatgattattgagtttttaaaagttttcgttatttgtttaagtgaaagttagtgaaagtgaaagttggttatttgattataggtttggatttttttttatttttttagggttttttagaagaagttgaacgttttttttgtattgagagggatagtaaggttttttttacgtgttagataagtagtgataagatgtattaaatttaagtgttaattgtattttgattttttgtatatgttatatattttagaaatatttattattattttattttattatattaggttagtttatttgtatttatttttatattaattttattaggtgtttttaaaataattatattttaaaaataataggtgggttaggagttcgagattagtttggttaatatggtgaaattttatttttattaaaaatatatattaaaaaaaaaattagttaggtgtttataatttcggaggttgaggcgggagaatcgtttgaatttagtgggggcggaggttgtagtgagttgagatcgcgttattgtattttagtttaggtaataagagtaaaatttcgttttaaaaaaaaaaaaaaaagaaaaaaagaaagtaaaattgttttggttattaggatttatttggtttgttataaaaatatgaagtattatattggttattgggtttaatttttttttttttgaaaaaggagttttttagataaattaaaagacgtgtataagatagaaaagatgttatatttgatttttgttatgtaattgtttgtagagatttaaaagtaatacggttttgttggtattcgtttttggttgtaaagagaaatataaatttaaataatgaaatttttttagggaaatatcgagtttttttaaggggataaagaattaattgttggtgagttggtggtgattttttaattaattttgtttttaattgttttagggaagggggagggaataggattgttgggaagaggttgaaattttaggtgtaagagagaatatttagtaagggtaaaaataatatatagttgtgaagataaatatttacggttttagtttgagttcggagttttatatgaattattgttgagttttattcgttgttttagttatggggtttgaaatagtttttttattgtttttgatttagaaataaaatagatttataaattattttgtagcgttttagataattttttttttgtttggggttttaaaaatattttttgtggtgattgattttcgatttatattatgaaatttgattaggagtttgtttagtcgattaggattaagtatatgtttttaggatttttatgaagaaaattatttgagaagggatttatttgtatttagatttgagataggtttggaatgtttgtttcgggttagtttttttgtgggggttttttcgtagaattgatttttttgtttttttagggtagagttgttaaagaaagtttttttattttttttatgtggtttttttattaagttttttttaatgtgaattaatttaataaattaaaaggaatatttagaaagatagtgatattttaaaaagtagttgtatgttgaatattgtataatagtaaattttagttttttgatttatttaagagtttatcgaggtatagttatgaatagttgttaagaataaaaagttttatatttatatttatatatacgtatgtatagttatgtatatgtagtatgttgttgtgttaatttgtatagtgttttatagtttgtagattttttttataggtattattttagggatgtttttatagtaattttaagaaagtatttatttatttttatgaatgaaggagttgagtttcgaaaggttaggtgatttatttaaggttaattaaggttagtaatggttttttgattgtaatacgaggggtttttttttgtattgtaggtatgagataaggaatttaatatttaaatggaagatttatttataaatgtatttatttattttgtagatatttattgagaaaatatagagaatggtgtaattggaagggagatatttttttttggcggtttaggaaaggtttgtagagaatttagaggtgagtatggataggtgaatagagtaggtattaggtggtgaataggtgaatagggtaggtattaggtggttataggttttgaaggtagagggagtagtaaaagtgaaggtttgaagggaagagattagggggtgatgtggaatgtggtttttgagtatagagtatatggagttggggagaggggttttggttatttaaatgttagttttatgttaatagagatattgatataattttagtatttggggtagtgtttggtttagaaagatgttttatagatatttgttaaataaatgagtgaattgaggggttttagagttagattattgaggagaatttagggaggggttttgggttatgatgggggttaggttggatatgggtagtttgtatttttgtttgggggagagtattttggtagtaggagggagaaagttttggaagagttcggggatattttattagtatgtgatggagaataaggggttggaaagtcgtgtttaggtgtaagaggaatttagaggattaggaaggaggatggttttagaagaataggtagattttcgataggattagcgggtttgtttttattgatttaaagaagaagatatattgattttcgtaattatattttgatttgttttggattttttttaaggagtgggtttttgttaagtgttttgaagtgagggtgaattagatttaatgtggttagcgagtttggggttgtttttttgggatgtatttagtgtcgtttttggataaatgaggtttatttatatttataagggttgaggttttatgtttgttaagttaatggttacggttgtgttattttattgcgggttttttttatgacggaaattgtttcgttgtaagtagattttgatgtgagaaaattaaagttagatgttaagtttattttgttttttaaagattaaagattaaattttatattttttagtatgtttttttagtaatattagtttttattattaatttcgttttttttttgtttaaggggtattatgtatggacgatagtttaaggaggtttttattttggatttattttatttaattttaaaaaattagattgattgtttttttagtggtttagtttttgttttggtttttatttttatttttttgggtttgtagttagagttagatgtatttttattcggttgtttcgttatggggattttttgtttggtttttttttgtatttaagaatgtttgtttattatttgtgtaaaatatgtattttgttgggtatagtaatgaagttttggggagaagtatagaacgtttaattgtaaattgagatgattattttttttagattaaatttattaaaatttatttatatttttatataaatattgttattttttaagttttttacggggttttgttttgttttttcgtggttgttttgtttagtttacgtttgtaatttttatttatgattgtttttagggttattttgaagatgtttttttagaatatttaatagtgatgaaattaagttttttgaggatttatttaatggtgttttaggtttatgaaagattttttatacggatttattaagtaagggtatagagtggggcggtgaagtatttggagtcgagattatgattatttaggtttaaattttaatttttttattattggttgtgtgattttgggtaagttatttaatttttttgtgttttatttgtaataaggtttttgttttcgagtatttttgttatggagatgtgtagatgaaatgaattaatagtaatagttgatatttggcgtggttatgtgttaggtattatgttaaatgttttatttatatgtttattataatataaatacgtggaaagagtttggagttatgtttattattagttaatagtgaaatattggttggaagattaattaattgaggtttggaaagagttgtttatttatagtgtatttggtgtttttgggagatataaatatgattttatttagtgttggtaaatttgaatttaaaatttagaaattaggggttttagtgtagtagtttatgtttgtaattttagtttttggggaggttgaggtgggaggattgtttgaggataggagttagaggttagtttgggtaatatagtgagattttatttatataaataattaaaaaatagttgggtgtggtggtacgtgtttgtagttttaattatttgggaggttgaggtaagaggatcgtttgagtttaggagtttgagattgtagtgagttataattatatttttgtattttagtttgggtgatagagtaagattttgttttttaaaaaataataaaattaaattaaatttagaaatttgggagttatgaaattagaggtatgtataatattgtattttttaaggttttttttttttttaattatacgttttttttatgtttttgtattgatttttttgataggtttgatttttttaatggtagttagtaaggaggagaggttggggatatgtcgttttttattttttgtggttgtagtatgtgagtattgtgtgtagggagcgttttgttttgttattagttacgtttggtacggtgcgggatggttttagatgtattatgagatgttgggaacgatattgtttattgtataatttagttttttttatgagaagtttcgagaaaaatttttaaagtttaatttagggagagttttatttttgttgaataattggtttgtatgtagtttattaatattttaaattttgttattagatgtatttgtgtttttgttttggttagtagaaagtttagagttgaattggtattttattttagtaggataaatagtaagtttatttagtgggttgtttttattttttaatttttttttggtttttgtttttttatttttattttgttaattatttatgttattattttgttttatatgtatttttataagttattttaaattttatatagtttgtatataggtaggggaataatggttatttaaaattattatatatatttataaatagaattttggagttgtagaggaaaattacgaagtttttttttaaaaaattgttaacgaagttaaatttttgtttatttaagtggtttttagatagttatgtttgggggtttgaaaatggggttttttttagttttttgatttagtaattttatgagaatttaattgggtttagtaacgtgtttgttttttttttttaatttaaatttaataaaatttttaatgtatttgatattttttgtcgtgttttttttttattaatttagaatattagtatgttttaagaagttagtgtttatgattttaaatgattagaatttaattttttaattgttgtttaagggagattattgtttgaagtttaataagttagttttattgggtacgtttttagttattagaagaaggatattagtattttggttttttttatttttattatgaatgtttggttgtttttttatattatttttgtgtttttgtgagtgattatagttatgattaaatgttatggaaaagtgtgagattgttgtagaggttatattttttaaggagtgtggtttgtagttttagttatttatagggaggttgaattaaggaggattgtttgagtttaggagtttgaggttgtgtggttttaagggtgttgttagggagttgtgaggtgttatggttggttttttaatattttagttattgggttattgtttagtttttttttagaattttgaattagttttttattttttggggttttttggttaatgtggaatttttgttgttgtgagtagagggaagtatttgtttttttagtttttgtttatttttgttgatgttatatattgtataggattgttaagattaatgtttgtgggtgataaatagaatttggaattgaaaatgtaaatttgagaataatagtttatgattaagaatttaaaagtaaatgtaataaaaataaagataaatagatgggatttagttaaattaaaaattttttttatagtaaaagaaataattagtaaatagataatttatagagtggaagaaaatatttgtaaattatgtatttgataaaggattaatatttagaatcgataatttaaataaattagtaagaaaaaaataaataattttattaaaaaatgggttaaggatatgaatagataatttttaaaagaagaaatataaatggttaataaatatgaaaaaatatttaatattatttgttattagggaaatgtaaattaagattatagggtgatattattttatttttgtaagaatggttattattaaaaataaaaaaaaaatagatgttggtatggatatggtgaaaagggaatatttttatattgttaatgggaatgtaaattagtataattattatggaaaatagtatggaaattagtataattattatggaattagtataattattgtggaaaatagtatggaaaattagaagtaaaattattatttgatttagtaattttattattggttatttatttagaggaaatgaaaaagatatttgcgtatgtatgtttatagtagtataattcgtaattgtaaaaatgtggaattagtttaaatgtttattaattaatgagtggataaagaaaatgtggtgtgtgtgtgtgtgtgtatatatatatatatatatatatatagatatatatgtatatatatatatatgtatatatatatatatatatatatatatatatatgtatatatgtatatgtgtatatatgtatatatatatatatgtatatatgtatatgtgtatatatgtatatatatatatatgtatatatgtatatgtgtatatatgtatatatatatatatgtatatatgtatatgtgtatatatgtatatatatatatgtatatatgtatatgtgtatatatgtatatatatatatgtgtatatgtatatgtgtatacgtgtatatatgtatatatatatgtttatatgtgcgtatgtatatgtgtatatgtgtatatatatatgtatatgtgtatatattatatatgtatatgtgtgtatatgtagatatatatatatgtgtatatgtatatatatatatatgtatatgtgtgggtatatgtgtatatatgcgtgtgtgtatatatatatatatattatggaatattatgtatttatgaaaaggaagaaaatggtatttgtagtaatttggatggagttggagattattattttaatcgaagtaatttaggaatggaaaattaaatattgtgtgtttttatttataattagaagttaagttatgaggatataaaagtataagaatgatatagtggattttggggattttgggggaagtatgggagtgggtgagggagaaaagattgtatattgggtatagtgtttattgtttgggtgatgggtgtaataaaattttagaaattattattaaagaatttattcgtgtaattagatattatttgtttttttaaaattatttaaattaaataaaaagataaaatgatttttgtttgtttttaaaggagtttgtgagagtaatattttgaattacgtttatttgtaataaagaaatttttattttaaataaaaagatagatatatttaatatttattaaatgattatttgtttgataggtatttgttgaatagtttgagaatatttttaggaattgttgtaatatatatatgtaagtatgtgtatgtttaaaagtatgtgtatgtttaaaaggtaattagtttttattttaggaaggtattagggattttttgatttatatattattttggtttaaagtgtatattgtagtatttattttgatatattgttttattttaggattgtttattttttgtatagtatattttttgttatgtgtataataaaataatgtattgaacgtttaaatttttattatgtgagaatggagaatacgtggttttttatgttgggtagcgtttggtgtaggtgatatattaagttgtttgcgggaattttttttcggcgatgtgtgagtttcggaatgtttggtgaaggtggggttgtagtggagtaattaagatatatatttgtgtagtgtggatttttttttgggtatagagttagaaatgtatttatagtgagatttttaaatgaatattttttagttttttgaattgtgataaaattttttttttttttttttttttttttgttttttttttgagatacggttttgttttgttgtttaggttgtagtgtagtagtatgattttagtttattgtagttttaatttttttaggtttaggtgatttttttatttgagttttttgagtagttgggattataggtgtatattatgttcgattaatttttgtattttttgtaaatatattttttatgttgtttaggttggttttgaatttttgagttaaaataatttatttattttggttttttaaaatgttgggattatatgcgtgagttattgtgtttggcgttttttttttaagtaaagtagatatttttgaaaattttttttttttttaggaattattttttttttttatttgtattttgtatatgtgttttgtttgtgttatgtatatgttttttagggaatgaatagttttagggtaggagagtatgttaggatgagtgttttagtgtatattttaaattagagtagtgtatgggttagggagtttttgatgtttttttgaaatgaagatttagttatttttgaaaagatattgttttgtttttattttgtggagttattttgtttagggttaagaagtagggatggagagttcgggttattcgtattgaagttttattttatttttttttggttgtgagttttggagttagttttttgtgttttgagtatttagtttatatttttggaaagtggagataatgttagtaatatagttcgttgtggtgaagattgataattattaagtttttaaaatagattttaaatatgttaaggttatttttttgttgttaaaatttgtaagagaaatttgggtgaagtggtttacgtttgtaattttagtattttgggaagttaaggtagaaggattattttaggttaggagttcgagattagtttggttaatatggtgaaatttcgtttttattaaaaatataaaaattagttaggcgtggtggtaggcgtttgtaatgttagttatttgggaggttaggttggtttcgaatatttagttttaagtgatttgtttgttttagttttttaaagtgttgagattataggtatgagttgtcgtaattagtttgaaggatttattttaatgttatagagaaatttttgtgatttatgtttagagtttttgttttcggatatgaaaattaaattagaaagaattaaaagaaaatgaaaaaggggttggtttgaagggtttaaaatttttaatgttttttgtttttataattttttttttttttgatatggagttttgtttttgttgtttaggttggggtgtaatggcgtggttttggtttatcgtaattttcgtttttttggtttaagcgatttttttgttttagtttttcgagtagttgggattacgggtatgtattattacgttcggttaatttttttttttaagtagagatagggtttttttatgttggttaggttggttttaaattttcgattttaggtgattcgtttagttcggttttttaaagtgttgggattataggcgtgagttattatatttggtttgtttttataattttatatatttttttgattttttattttttaaattgttaattgcgttgttggagaagaaagaattgatgggatttggtatacggtcggtatttgataatagttgtttaaatggatgagtgaatgattgaatttgaataaaggttgtttagattttatagttgttatttgagttatttatattatttgggtaaagttttttttttaaagaatttaatttttttaattttttttttttggtaatttttttttttgagataaatatattaaaatatatatattttatttaattgatggaattttttagaggaataggaaatttagtttaagtgaagatattttgtgtttttatattaggatgggttttttagagataaatgtgtgaagttaggaaaaatagtattaagaggaaataatgtatgtgtaggtagcggtggaaatatttaggatttattttatgggaatttagattattattattttaaaattttttttatgttagtatagttgtgaggatgttattaggtagggttgtgtattttaggtttatgttagggtttgagttttgcgtgattttgattgtaatttttattcgtagatggtagtgtattttttttattgttaatatttaagatttttttataggttttagatatatttgtaagtgatgttgagaataaatttatatttttaagtttttatatgttgaataaatattttttttttttgtttatattttagttatggtttttaggtgtggaatgattttttttattttattttatttagaaagtgcgtttttgttttagatggttttgatttttttagatttgaagtttatatttatgttaagtttatagttttttgattgtttaagttttttgtagaattttaattaataagaagtggaggagataaatgaggttttattggcgtggattttataattagaaatattgggatagaaatttaaaatttagagaaagcgaaggtttttagattttaaggaatatgaaaaaaatgtatgtattggatagagtttgagaggtatttttggaaattcgttttagataatagattttaaatattaatattttttagttatagtgattttgggtttattatttacgtgttaattatttaagaaggtattgatatgtattttttgttttttgtttaagttggatttttttttttttttttttttttttttttttttttttttttttttttttttttttttttttttttttttgatggagttttatttatgttgtttaggttggagtgtaatggcgttattttagtttattacgattttaattttttaggtttaagggatttttttgttttagtttttcgagtagttgagattaaaggtatgtattattatttgtttagttaattttgtatttttagtaaagattgggtttttttatgttgattaggttggttttgaatttttgattttaggtgatttgtttatttcggttttttaaaatgttgggattataggtgtgagttattatttttggttttaagttggattttttttttagtatttttttattagatgcgattttattaatgttttgtagtttttataatttattgtttaaaatgttttttttttttttttttagaaaggtaggtttgattttatttaaatgatagtgattgttttattaatagtagttttgtgatttgttgtttacggttagtagttagtagttgatttttttttgtatttatatagttttttttttattttttttttaagggttttttaggattgttggagtttattttttatgaggttttttttagcgttagtttttatttttttttgttttttttgtttatatttaagtttggaatattgtgagtttttaaagttttatatgtaaagattggttgtagggatttgaaattgagtaggaggattttattttgaggttttgagaaggaacgtcgttttaggataaattttattgagtagcgagtgtttttggtgtcgttttatagtatttgtttattttgtttgtttgttgttatatcgcgagaataaagagtagtttattgttttttgtaagtgtttttaattagttgttatagatggagttttgatatgatagttttaggaggagttgtttaagaaatagaagttaggtggtagtttcgttttttttgtgcgtgttttgtgtatttagttagtatgggtattgttttagtttgtgtaggttgtttttatagagttttatagattggttggttgaaataatgggattcgagtttgtatatttttggaggttggaagtttaaaattagatattagtagggttagtttttggtgaggtttttgtttttgggttgtagatggtttggttatttttttgttttgtttttatatggtagagagagagagagagagagagagagagagagagagagttcgagttttggttttttttttttttaataagggtattaattttatcgtgggattttatttttatgattttattaaattgaaattattttttaaaggtttttttttttaatattattatattgggagttagggttttaaaatatgtatttcgggaggatagaaggtaaggtttgttttcggtatttttttttttttttttttttttttgttttgagatggaattttattttgtcgttagtttggagtgtagtggtatgattttagtttattgtaatttttatttttcggatttaagtaatttttttgttttagttttttgagtagttgggattataggtatgtttagttaatttttgtatttttagtagagacggggttttattatgttggttaggatggtttggattttttgattttatgattcgtttatttcggtattttaaagtgttgggattataggtatgagttacggtatttcgtttgtatttggttttttatatttgtttttttttttttagtttttttcgttttgtttttttttggttttttttgtgtattgtgagaagtcgatggagatatgttttttgattgttgttataatggaagaatatttttttttttttagg

SEQ ID NO: 474 - DNA, 26997 bp, Artificial Sequence
  chemically treated genomic DNA (Homo sapiens)
tttggaggagaagaaatatttttttattataatagtaattaaagagtatgtttttatcgattttttataatatatagagagaattaaagaagggtaaggcggaagagattgggggagaaaggataagtgtgaaaagttaaatataggcggggtgtcgtggtttatgtttgtagttttaatattttgggatgtcgaggtgggcggattatgaggttaagagatttagattattttggttaatatggtgaaatttcgtttttattaaaaatataaaaattagttgggtatgtttgtagttttagttatttaggaggttgaggtaggaaaattgtttgaattcgggaggtggaggttgtagtgagttgagattatgttattgtattttagattggcgatagagtaagattttattttaaaataaaaaagaaaagaaaagaaaagaaatgtcgaaaataggttttgttttttgttttttcgaaatgtatattttgaagttttaatttttaatgtgatgatattaggagagagagtttttgggaggtaattttagtttgatgaggttatgagggtagagttttacgatgggattagtgtttttattagaaaagaaagagattagagttcgagttttttttttttttttttttttttttttttttttttttgttatgtaagggtagagtaagaaggtggttaggttatttgtaatttaaggatagagattttattagagattggttttgttggtgtttgattttagatttttaatttttagaagtatgtaagttcgagttttattgttttagttagttagtttgtggggttttgtgaaggtagtttgtataggttaggatagtgtttatattggttagatgtatagaatacgtataagggaggcggaattattatttggtttttgttttttaagtagttttttttgaaattgttatgttaaaattttatttgtgataattgattggggatatttgtagggaatagtgaattgttttttgttttcgcggtgtgatagtaaataggtagagtagatagatgttgtggggcggtattagggatattcgttgtttagtgaggtttattttggaacgacgtttttttttaaaattttagaatgaaatttttttgtttaattttaaatttttgtagttaatttttatatatggagttttgaagatttatagtgttttaggtttaggtgtagataggaagggtagggaagggtgaggattgacgttaggggaggttttatggggagtggattttagtagttttagaggatttttgggaaagggatagggaaggaattgtgtggatgtagagaggggttagttattgattattgatcgtgggtaataggttatagggttgttgttagtaaggtagttattgttatttggataaagttaaatttatttttttggaaaaagaaaaggaaaatattttaaatagtgagttgtgaaagttataggatattggtgaaatcgtatttgatagggaaatgttaaaaagaaaatttagtttagggttaggagtggtggtttatatttgtaattttagtattttgggaggtcgaggtgggtagattatttgaggttaggagtttaagattagtttgattaatatggagaaatttagtttttattaaaaatataaaattagttgggtaagtggtggtgtatgtttttaattttagttattcgggaggttgaggtaggagaattttttgaatttgggaggttgaggtcgtggtgagttgagatggcgttattgtattttagtttgggtaatatgagtgaaattttattaaaaaaagaagaaaggaaagaaagaaagaaagagagagagaaagagagagaaagaaaagagagagaaaatttagtttaagtagaaaatagaaaatatatgttagtgtttttttagatggttaatacgtagatggtaaatttagggttattgtagttgagaagtattaatatttagggtttgttgtttaaggcggatttttagaaatgttttttaggttttatttaatgtatatattttttttatattttttggaatttgggaattttcgttttttttagattttagatttttattttagtgtttttggttgtgggatttacgttaatgaagttttatttattttttttattttttgttagttggagttttgtagagaatttggataattaaaaaattatgggtttggtatggatgtgaattttaagtttaaggaggttaaaattatttgaggtaggagcgtattttttgagtggggtgagatggagaaggttattttatatttgaaagttatagttgggatgtggataggaagggaaagtgtttgtttagtatgtgggaatttgaaaatataggtttgtttttagtattatttataaatgtgtttgaagtttatggagggattttaggtgttggtagtgaagagggtatattgttatttgcggatggaggttatagttagggttacgtaggatttaggttttaatatgggtttggaatgtatagttttgtttgatggtatttttatagttgtgttaatatgaaggaaattttaaaataataatggtttgagtttttatgaagtagattttgaatatttttatcgttgtttatatatgtattatttttttttgatgttattttttttggttttatatatttatttttaaaagatttattttaatatgaaaatatagagtgtttttatttagattgagttttttatttttttggaaaattttattagttgagtagagtgtatatgttttggtatatttgttttaaggagagaagttattagggaagagaagttagagggattaggttttttaggaaaaagattttgtttagatgatgtgagtaatttaagtaataattataaaatttagataatttttgtttagatttaattatttatttatttatttagatagttgttattaagtgtcggtcgtatattaggttttattaatttttttttttttaataacgtagttaataatttgaaaagtaaaagattaaagagatgtataaaattatagaaataggttaggtgtggtgatttacgtttgtaattttagtattttgggaggtcgagttgggcggattatttgaggtcgggagtttgagattagtttgattaatatggaaaaattttgtttttatttaaaaaaaaaaattagtcgggcgtggtggtgtatgttcgtaattttagttattcgggaggttgaggtaggagaatcgtttgaattagggaggcggaggttgcggtgagttaagattacgttattgtattttagtttgggtaataagagtaagattttatgttaaaaaaaaaaagaattatagaaataggggatattgaggattttgaattttttagattaattttttttttatttttttttagttttttttagtttaatttttatattcgaggataagaattttaggtatagattataagagtttttttgtgatattaaagtagattttttaggttggttgcggtagtttatgtttgtaattttagtattttgggaggttgaggtaggtagattatttgaggttaagtgttcgagattagtttggttttttaagtagttggtattataggcgtttgttattacgtttggttgatttttgtatttttagtagagacggggttttattatgttggttaggttggtttcgaatttttgatttaaggtgatttttttgttttggttttttaaggtgttgggattataggcgtgagttattttatttaggttttttttgtaaattttaatagtaaaagagtagttttaatatgtttgggatttgttttgggagtttaatagttattagtttttattatagcgaattgtgttgttggtattgtttttattttttagaggtgtgaattgagtatttaaaatataaggggttggttttaggatttatagttaggaggaggtagaatgagattttagtgcgggtggttcgaattttttatttttgttttttaattttgaatagaatgattttataaagtaaaggtaagataatgtttttttaaaggtaattagatttttattttaggaaggtattagggattttttgatttatatattattttggtttaaggtgtatattaaagtatttattttgatatatttttttattttgggattgtttattttttgaaaagtatgtgtatgatataaatagggtatatatataagatgtaaataagaaagaggagtgatttttggagaagaaaagaatttttagagatatttgttttatttaagaaaaggacgttaggtatagtggtttacgtatataattttagtattttgggaggttaagataggtgaattgttttagtttaggagtttaagattagtttggataatatgaaaaatgtgtttataaaaaatataaaaattagtcgggtatggtgtgtatttgtagttttagttatttaggaggtttaggtgggaggattatttgagtttggggaggttgagattgtagtgagttgagattatgttattgtattgtagtttggataatagagtaaaatcgtgttttaaaaaaaaaataaaagagagaaaaaaagaaaaggaaattttattataatttagagaattgaaaagtgtttatttgaaagttttattataaatatatttttagttttgtgtttaagaaaagatttatattgtataaatgtgtgttttgattattttattgtaattttatttttattaggtatttcgaggtttatatatcgtcgggaaaaagttttcgtaaatagtttggtatgttatttgtattaagcgttgtttagtatagaggattacgtgttttttatttttatatgataaggatttggacgtttaatgtattgttttattgtgtatatgataaagagtatgttgtgtagggaatgaatagttttgaagtaggatagtgtgttaggatgagtgttgtaatgtatattttaaattagagtagtgtatgggttagggagtttttgatgtttttttgaaatgaagattagttattttttaaatatatatatatttttaaatatatatatatttgtatatgtgtgttgtagtagtttttgagaatatttttaggttatttagtaggtgtttgttaaatagataattatttagtaaatattaaatgtatttgtttttttgtttggggtggaaatttttttattgtaaataagcgtggtttaagatattgtttttatagatttttttgaggataaataaaaattattttgtttttttatttaatttaaatagttttgggggaataggtggtgtttggttatacgaataagttttttagtggtgatttttgagattttgttgtatttattatttaagtagtaaatattgtatttagtgtgtaatttttttttttttatttatttttatgttttttttagagtttttaaagtttattgtattatttttatgtttttgtgtttttatagtttagtttttagttataagtgagaatatataatatttggttttttatttttgagttatttcggttagaataatggtttttaattttatttaagttgttgtaaatgttattttttttttttttatgggtgtatagtattttatggtgtgtgtgtgtatatatatatacgtatatatatatatatatttatatatatatatatgtatatatgtatatatatatatatatgtatatttatatatgtatatatatatatatataatatgtatatatatatatatatatgtatatatatatatatgtatatacgtatatataaatatgtgtgtatatatgtatatacgtgtatatatgtatatatatatatatgtgtatatatatgtatgtatatgtatatatatatatatgtgtatatatatgtatgtatatgtatatatatatatatgtgtatatgtatatgtatatatatgtatatatatatatatgtgtatatgtatatgtatatatatgtatatatatatatatgtgtatatatatatgtatatatatgtatatatatatatatatgtgtatatatgtatatatgtgtgtatatatgtatatgtgtgtgtatatatgtttatatatatgtgtgtatatatatatatatatatatatatatattatattttttttatttatttattggttgatgggtatttaggttggttttatatttttgtaattgcgaattgtgttgttataaatatgtatgcgtaagtgttttttttattttttttgggtagataattagtggtgggattgttggattaaatggtagttttatttttaattttttatattgttttttatagtggttgtattagttttatagtggttgtattagtttttatgttgttttttatagtggttgtattagtttatatttttattggtagtgtaaaagtgttttttttttattatatttatgttaatatttattttttttttatttttaatgatggttatttttgtaggagtaaaatggtattattttgtggttttgatttgtatttttttgataataagtgatgttgagtgtttttttatgtttgttggttatttgtatttttttttttgagaattgtttatttatgtttttaatttattttttgatgaaattatttattttttttttgttgatttgtttgagttgtcgattttggatattagttttttgttaaatgtatagtttgtaaatatttttttttattttgtgggttgtttgtttgttgattattttttttgttgtgaagaaagtttttggtttaattaagttttatttatttatttttgtttttgttgtatttgtttttggatttttggttatgaattgttatttttaaatttatatttttagttttaggttttatttgttatttatagatattagttttgatagttttatgtaatatgtggtattaataagagtaaataggagttgggaagatagatatttttttttgtttatagtagtagaaattttatattagttagggggttttaagaggtggggggttggtttagaattttgagaaagaattgaataatagtttaatggttgggatattaaaaagttagttataatattttataattttttagtaatatttttggggttatatagttttaaatttttgagtttaagtaattttttttggtttagtttttttatgaatagttgggattataggttatattttttgaggagtgtaatttttgtagtaattttatatttttttatggtatttggttataattgtggttatttataggaatatagaaatagtgtaggaagataattaaatatttatgatggaaataaaaaaaattagaatgttggtgttttttttttagtaattggagacgtgtttaatgaaattggtttgttgagttttaaataataattttttttaaatagtagttggagaattaagttttaattatttaaaattatgagtattgattttttaaaatatattagtattttgaattaatgagaaaaggatacggtaaagaatattaaatatattggaaattttgttaaatttgagttaaggagagaaggtagatacgttgttaagtttagttgggtttttatagggttattgaattagagggttggaagaagttttatttttaagtttttagatatgattgtttggaaattatttggatgaataagagtttagtttcgttaatagttttttagggaggggtttcgtaatttttttttgtaattttagagttttatttataaatatgtatagtggttttaaatagttattatttttttatttgtgtgtaagttatgtgaagtttggggtggtttataaaaatatatataagataaaatgataatataaataattaatagaataaaaatgaggaaataagggttaaaaaggaattaagagatgaaagtagtttattgagtaagtttattatttattttgttgaggtaggatattaatttaattttgagttttttattagttaaagtaaagatataagtgtatttgatgataaggtttgaggtattaataagttatatataaattagttatttagtagaaataaagttttttttgggttaagttttgagagtttttttcggggttttttatgaagaaaattggattatgtagtaaataatatcgtttttaatattttataatatatttaagattatttcgtatcgtgttaggcgtagttggtggtagagtaggacgttttttgtatatagtgtttatatgttgtagttatagaggatgagagacggtatgtttttagttttttttttttattggttgttattggaaagattagatttgttagagaagttaatgtaaaaatatgaaaaaaacgtgtaattaaaaaaggagaaaattttgagagatgtagtgttatatatgtttttagttttataatttttaaatttttagatttgatttgattttattgttttttaagagatagggttttgttttgttatttaggttggagtatagaggtatgattatagtttattgtagttttaaatttttgggtttaagcgatttttttgttttagttttttaagtagttgggattataggtacgtgttattatatttagttgttttttaattatttgtatagatggggttttattatgttgtttaggttggtttttaatttttgtttttaagtaatttttttattttagtttttttaagaattgggattgtaggtatgagttgttgtattgaaatttttaatttttagattttaaatttaaatttattaatattaaatagggttatgtttatgttttttaagagtattaaatgtattgtgggtaaataattttttttaggttttagttggttaattttttaattagtattttattgttgattaatgatgagtatggttttagattttttttacgtgtttatgttataataaatatatggataaagtatttaatatggtgtttggtatatgattacgttaggtgttagttattgttgttagtttattttatttgtatatttttatgatagaaatattcgaaagtaggagttttgttatagatgaagtatagagaggttggataatttgtttaagattatatagttagtagtggaagaattgggatttgaatttagatagttatggtttcgattttaagtattttatcgttttattttatgtttttgtttggtaaattcgtgtgaggagttttttatagatttaaagtattattgaatggatttttagaaaatttaattttattattattaagtattttaaaagaatatttttagagtggttttgaagatagttatggatgagggttatagacgtgagttgagtagggtagttacgaaggagtaaggtagggtttcgtgggagatttggaaggtggtaatgtttatgtagagatataaataggttttgataagtttggtttaaaagaaatagttattttaatttgtagttaagcgttttatgtttttttttaaaattttattgttgtgtttagtagggtgtatgttttatatagatgatgggtaaatatttttaagtgtaaaaggaaattagataaaaagtttttatgacgagatagtcgagtgggagtgtatttgattttgattgtaggtttaaaaagatggaggtgaggattaggataggagttggattattggggaagtagttaatttaattttttaagattaaataaaataagtttaagatgaaagtttttttgagttgtcgtttatatataatattttttaaataaaaaaaaagcggggttggtggtggggattaatattattgaaaaaatatattgagaaatgtaaaatttggtttttagtttttgaaaaataaaataaatttggtatttgattttggtttttttatattagagtttatttatagcgaggtaattttcgttatggaaagaattcgtaatgaaatggtatagtcgtggttattagtttgataagtatggagttttagtttttgtgagtgtgaatgggttttatttatttaagaacggtattgaatatattttagaggggtagttttaagttcgttggttatattaaatttgatttatttttattttagaatatttagtaggggtttattttttggagaaagtttaaggtaagttagaatgtaattgcggaaattaatatgtttttttttttgagttagtggaggtaaattcgttaattttgtcgaaaatttatttatttttttagagttatttttttttttaattttttgaattttttttgtatttggatacgattttttaattttttgttttttattatatgttggtgaaatgttttcgaatttttttaaagtttttttttttttgttattagagtgtttttttttaaatagaaatgtaagttgtttatgtttaatttaatttttattatggtttagagtttttttttagattttttttagtgatttggttttggagttttttaatttatttatttgtttagtaaatatttgtggagtatttttttaggttaagtattgttttaggtattggagttatattagtgtttttattaatatggggttggtatttgagtagttaaagtttttttttttaattttatgtgttttgtgtttaaagattatattttatattattttttagttttttttttttaggtttttatttttgttattttttttgtttttaaggtttatgattatttgatatttgttttatttatttgtttattatttggtatttgttttatttatttgtttatgtttatttttaggttttttataagttttttttgggtcgttagagaggaatgttttttttttaattgtattattttttgtatttttttagtaagtgtttgtaggatgagtgagtatatttatgaatgaattttttatttaaatattgagttttttattttatatttgtagtgtaagagaaagtttttcgtgttgtagttagaaaattattgttgattttggttgattttagatgggttatttaatttttcgaggtttaatttttttatttataaaaatgaatggatgtttttttgaggttgttgtgaggatatttttgagatgatgtttgtgaagaaagtttgtaaattgtgaagtattatatagattaatatagtaatatattgtatgtgtatggttgtgtatgcgtgtatgtgggtgtaaatgtgaggttttttgtttttggtaattgtttataattgtatttcggtgaatttttaggtaggttaggaagttaaggtttattattgtgtagtgtttagtatgtaattgttttttggaatgttattgtttttttgaatgttttttttggtttattaggttagtttatattaagaagaatttggtgaggaagttatatggaagaaatggaaaggttttttttggtagttttattttaagagggtaaaggggttagttttgcgagagaatttttataaggaggttggttcgggataagtattttaggtttgttttaagtttgaatataaataaatttttttttaggtggttttttttataaggattttaaaagtatatatttagttttaatcgattgagtaagtttttaattaagttttatagtgtgaatcggaggttagttattataaaaggtatttttaggattttagataaggaggggattgtttggagcgttgtagggtaatttgtgggtttgttttatttttgaattagaggtagtggaaaagttgttttagattttatggttggagtagcgggtggagtttagtagtgatttatgtagaatttcgggtttaaattgaaatcgtagatgtttgtttttatagttgtgtgttatttttatttttattaaatatttttttttatatttggaattttagtttttttttaatagttttgtttttttttttttttttgaagtagttgaagataaaattaattaaaaagttattattagtttattaatagttagttttttgtttttttaaaggggttcgatgtttttttgagaaagttttattatttaagtttatatttttttttatagttaaaaacgaatgttagtaagatcgtgttgtttttagatttttataagtagttatatgataaagattagatgtgatattttttttattttgtgtacgttttttaatttgtttgaaagattttttttttagagaagaaaggattgagtttaatagttagtatggtgttttatgtttttataataggttaggtgaattttggtaattaaaataattttatttttttttttttttttttttttttttttgagacggagttttgtttttgttgtttaggttggagtgtaatggcgcgattttagtttattgtaattttcgtttttattgggtttaagcgattttttcgttttagttttcgggattataggtatttggttaattttttttttaatatatatttttagtagagatggggttttattatgttggttaggttggtttcgaatttttgatttatttattatttttaaaatgtgattgttttggaaatatttggtgaggttaatgtaaaggtgagtgtaggtgaattgatttgatgtgataaagtaagatagtaataaatgtttttaaaatgtgtaatatatataaaaaattaaaatgtagttggtatttggatttggtgtattttgttattgtttgtttgatacgtggagagaattttgttattttttttaatgtaggaaagacgtttagttttttttaagaagttttgagggagtgaagaagagtttaggtttgtggttaaatggttaatttttatttttattaatttttatttgagtaagtgacgaaaatttttggaaatttagtggttattcgtaaatgtgaataattataataatgttattttatagatgtttgagaaaattggataatatgttgtatattaaaatttattaataaattatgtgggttttagaaatatgggttaatattattttttttagggttttttttttttgtttaggtagagttgatggtatttttatatttgttattgttgggttttgaatatcgttttgtattgaatgtgttttatgattttatagaattttttttatttttggtagattatgagttttttttagtttttttttttttttttttttttttttttttttttgagatagagttttgttttgttattggagtgtagtgtcgtgattttagtttattgtaatttttgttttttaggtttaagtgatttttttgttttagttttttgagtagttgggattataggtatttgttattatgtttagttaatttttgtattttttgtagagatgggggttttattatgttggttaggttggttttgaatttttgattttaagtgatttgtttattttagttttttaaagtgttgggattataagtgtgagttatttgtattcggttagttttatttaatttttaatttatttttatcgaagttaatatagtttatgatgtagattaaatattaaatatacgttggttttttgtagtatttgttaatttcgatattagtgttattcggagttaggttattttttggataggtgggggtgggggttgtaggggcgttgttttgtgtattgtaggatgttttcggtttttatttattagatattagtaatattttttagttgtgattagtagaaatacgagtattggtaaatgtttttgggggttatattacgatggttgagaattattgggttaatgaattaagatttattgagtttaggtaaggaggtaagagttttttgttttatttggtgtttattagagagaagtttttgtttttagtgtttggggtgatgtttaaaaggggtttttaaaggggtttttatgtttatgaggatttttagttatggtttgttcgtattttgtttggggtatattttttaagttttggtttattttcgtttttttttttttttatgttatatgtttaatttattagtaaagtacgttaattttattttttaattatatttaggatgcgattgttttttttatttttttttgttattatttttatttatttttacgtagatgttttttattttatatttatatttttttaggaagattttaatataggagttagagaggttttgtaaaatttaagtaatattatattttttttttgttttaagttttttaatgatttttgaatttattagaaagtgaaagttaaagttcggtaatggttttacgggttttttaaatttattatttattatttttttttttggatattaaatagtagttacgatggtttgtttgttgttttcgaatattttaagttgattttagggtttttgtatttagtattttttttttttggaatattttttgttgtttaattacgggtatttttttttaattgtttttgtagttttatttaaatattatttttttgtgattttttttagttattttttttagagttgttattcgttttacgtttttatttttttttttagtatttattatgatttaatttgttgtgtttttataagtggtttgatgttatgattatttttattgttagaaagtgaatttagtgaggtaaaatttttttgtatattttattattttattttaagagattaggaaagtaggtgtttaataaatatttattgaatgaatgaatgattttacgtataaatagtatgtttaaggttttgatggatttagtagatattttttatttttttttatttttattatatgataaatggtatgttttttaaataatatttataaaatattttgttatttgattcgaggttggagttatttatggtatgtaatgaatttattttagagagaggtaaggtttagatagtattgtttttcgttgtataggtttagttgggtaaagcgttaatgtggcgggagggaaggaggtattttttaatttaggtaaggatttttggggaataattttattttcgcgtagatttttttagattattcgttgggtgggttatttttatttagttgttgggtttttttattttttatttttttggatcgtgtaatagagtagtggtttttagattattaggtatcggaatttcgtagagggtttttttaaatatagcgtgttgggttgttatttaggtttttttcgattttagggtagggtttaagaagtcgtattttaaataagtttttaggtggaggtgatgttgttggtttcggagtttacgttgagaattattatatcgggggaatttttatttaatagaattaaatatggtaatggttttaggtggtttgtagattgggttgaggggggatttatagtatggtatataaattgattgagttttatttgtagtgagtttttaggtgggttttacgaaatcgttatcgtttgtggaaaggggaaggtgttatttagtgtaagttgtttgtgatttggttggtttgagttggggatgtttagatggaggaaaagtagtttgttttgtatagatttgttagtttgtttacgagaagatagtttgtttgtggattatgagtgagtaggtgttattttttggtttattttgttagtttattatgatttgagttttggggattttatagtaaatttagggtattggtagggagtttacgagaggttgagtaggcgttgaaatttttagttaggtttttggtgtggatggtataggaaaatagttggttttagtttggttatatattgatagttttttattgtgtgaatatttggggttttttggtgcgtgaggttagagtgaagaaagggagagggtggttgtggattatcgaagttgaaaaatgatgttttgtgtttatataacgtgtaattagattattgtttgtaagaatgttgttgtttgatttggtagtggttaagttaaatttataaggatattttagttggttcgtaaagtagtggttttttttttttttgttttttttttattatgttttatagaaattttattataatggtaatagatttcgttttattatttgtattttattttaggagtttgtaagtacgttaggattgaggttttgtagaattttattattcggttgggaattaagtttttttttttttttaaagtatatggttttttttttcgtgggtattggatggatagggatggatagagggtattatttttaagttgggtattttaggtagaaggaggtgggttatgttttggaaagatttaagttgtagagagtgtatttttttcgtggaggtgtttgtaagatagttaggggttataaaggtaatagtttataagttttagttaaagagtaatatttgatttacgtaatttttttttggatttgattttaagtggtatgtgtattataggaaagtttattatgtataagttaagaggagggataattagaagaagttattgggttaggggttaggagatgggttaattttttggtatagttggtttggggttttcgagtttggaaggatgtaggtgtaggtagtggagcgttgaggagttgtatttttggcggggtttttttagaggtaggtagttatatattgttttgtagtattttatttgtgagttttttcgtggtagaatttgcgttttcgtgaattttgtttttgttttggtttttcgagttgggttgatatagttcggtgttggtttacggtgtttaaaataaagtagagtgaattacgtttatgtttttttttatggagttgtatttgatattcgtaaagagtttatagtgaggtcgggtatggtggtttacgtttgtaattttagtattttgggaggttgaggcgggtggattatttgaggtaaggagttcgagattagtttggataatatggtgaagttttattttcgttaaaaatatgaaaattagttattcgggaggttgaggtaggagaatcgtttgaattcgggaggtagaggttgtagtgagtcgagattgtgttattgtattttagtttgggtgataagagtaaaattgttttaaaaaaaaaaaaaaaaaaaaaaaaaagtttatagtgagttagtaaagtttgcggatgggattttaggtagttttttgtttgttttaaggttgtttttaatttttggttgagatgagttttagttttattgataattgtttagttttttttttttttatttttttttaggaagttcgttggattgttaatagtagaatattgatttattatttatgttttaatttttttagattattgagtttgagtagttttttagtgaatttttgatttgatacgttattttttttattattcgttgtttagttaggttgagttttagtagtagcggtgaattggttttttagagtatattggtttggagatttaaaaagtataatgggttattagttattgatgagtgtagtatttttggaagttaggtgtgggggttagttttttgtgttaatttggttaggtcgtagtatttagtgatttaattaaatgttaattgaggttgtattgggaaggtatttgtataggtagttagttagttgaatttgattaaaggagatgatgttagataatgtgagtgggttttgtttaattagttgaaggttttaagaataaagtttgcggtttttagagtagaagaaattttgtttattttttagtttgttagttttttttgtagattttagatttgtttatttttataattgtattagttaatttttttaaataaatattttaaaatgtaaaaatattttataagttttatttttttagagaattttaattgatatattaggttagtatttagatataatgttaggagatatattgagttttgggggagacgggtatgagttttgtattttttttttttataaaggggattagtgttagttatttttttttttttttttggaatatttttgtgggtaggggacgatgatatttggtgattggttgatatttgtatattgttagatgttttaaagcggaggtagtttttgtagttagtgttttttttttgtttattataatttagttgtttttttttttaaaggaggtacgtaggtttggattgaaggtagatgaggtttattttgttttttttatgaatagtatttgttaaatcgatattatcgaatttatcggaggattcggaggatgaagaggatgatatgatggtttttattcggtatttatttattaaaatatattatcgatgttttaggagttggaatagtattgaaagtttatgacggtagtaatttgggtaatgttagaattttatgagttttgagagaggaatttttaaagtttttattgtttttttgaaagaaaatgttaaggtcgggcgcggtggttaatatttgtaattttagtaatttgagaggttaagatgggtggattgagttcgagattagtttggttaatatggtgaaattttatttttattaaaaatataaaatttagttaggtatggtggcggatgtttgtaattttagttatttaggaggttgaggtaggggagtcgtttgaatttcggggggtggaggttgtagtaagttgagatcgtgttatttttttgtagtttgggtaaaaaagagtaaaattttatttaaaagaaaaataaaaaagaaagaaaatgtttagtttttttgaaaaagatgtttttcggaaagagatttttagcgtagtattagttttttatttgtttgatagaaaaattatttaagagttttttttagtttgttgcgttgagggttttggggcggaattgttttggtgttttttttatggattgaagtttttggtgttttttttttttatagattgtagttttttgtttggggtttagggttattttaaatttttaatttgtatttttggggttataatataggttggaaaagtttttttatgtttggttaggagggagaggagatattagttattaaggggtattataggtttatattaaggaaaatagtgtttgtattttttttataaatagaatgtttatttttttattttttatttttatttttttgagatggagtttttttttgtcgtttaggttggagtgtagtggcgcgatttcggtttattgtaagtttcgtttttcgggtttatgttatttttttgttttagtttttcgagtagttgggattataggtgtttattattacgttcggttaattttttgtatttttagtagagatagggttttattatgttagttaggatggtttcgattttttgatttcgtgatttattcgttttggttttttagagtgttgggattataggcgtgagttattgcgttcggttagaatgtttattttattttaaattcgggagtaatatagtgagaataatagaaatttttatttttggagtattgttttcgtttttttatttagttttttttcggaggtttgttgaatttagattggttttaggttagatttttaaataagggttaggatatggtttattttgtttgttgtttatcggaaattattttagtgtttttttgtttgagatgttttttttttttttttttattttttaatattttttttttttttgtaggtgaattgtttataggtagaaattagtttttgtagaagaaaagttttagaaatgtgtttcggttttagtgttttcgtcgtgattacgttggtatatatgggattatatgattttatttaaaatagaatttatttagtgtttttaggttgtgttttattaattgatttattgtataaatattgttgtattttttagaatatgattattttgtatttttttgtgttttagaaatatatatagttaatgattaatagaaatattgtattaaatgtataggatttatgggtaaaaaatatttatatgtaattattaattttttataattttggtgttttggatttattattgtattttttatttaggtttttttgtaattttaggaatgaattttttgatgagatttaaaaatatttatatgtaattattaattttttataattttggtgttttggatttattattgtattttttatttaggtttttttgtaattttaggaatgaattttttgatgagatttaagatgggtttgtttcgagttttatttaaaggattagtgcggtggtaatatgtagtattagagttagtgtatttttaagaagtagatgtatagacgtaaattgattttttagagtggaggagtgttttggtattttttatttttttatttggtacgtttagttttgtcgttgatattttttttaggatattgtgatttggtatttttattaatattatattaggaattgacgtaatcgtttttagatttataaattatgatatttataataaatttttttagcgttaaaatatatatgtaataaaaaggttttattatagttttaatagagtggaaaatgtttagggtgtggagttaaatatttttggtttaaatttaaattttgattttatttaagtggtgatttggggttagattggaaatgtttgattataggtttttttatttattaaatggggttaagtatattttatgaggggttgttcggaggattgaggggttattggatataaaagggttttgtatatagtaaagttttcgaaaatgtgagttgtttttatgatttgatggtagattatgtaatatttcgaagaaataatttgttttttattttaagatttgatatttttttttttgaatatatatggggtattagattataattgaaattaattttattttttaaaattatatagaatttaatattttttgagggttagggatagttttgtatttggtaatatattttacgtgatagttgtatgtttatgataaatttagggaagttaataattatgggagatattggagagggttttatgtgtaagttaagaggaggaaaaaaaaaaaaaataaatagtaggtattaagagaagaggatcgtagagattagagggtggggtgagggtggagggtagataatggagatttattagtaaatttaagtggtttggatatacgtcgtattgtttggttattagttgatattttttttttgtgaaaatataagacggtattattttttaggtaattaaattttagatgaattttgttatatgtgggtaaggttttttttttatagagttttcgtgtttgggaaatagaattgaatatatttttaaagagagtttttggtaaatatattattaattttataaattttattttttatataaattattggagaatatatttttttagcgttgtttaacgttatcgtttaatggtttttttttttttttttttttttttttttttttttttttttttgttagttagagttttgttttgtcgtttaggttggagtgtagtggtatgatttcggtttattgtaatttttgttttttggatttaagtgatttttttgttttaggttttcgagtagttgggattataggtatagtggttttgttttttaagttaatttttagagaagtatgattgatttttattttgtttttgtaaaggataggaaaatgggaggttagggagagaaaggggcggaagtttttttattttgagttatttatttggttagggttatattttattttgatggtgattttggttgggggttgagatagttaattttgttgagggacgcgtgggtttattttggaagtttgtttatagtcgttggaggaggacgcggttatttttgttttagttaggtgtggcgtttcgtaggtatatttaaataacgattggtttttatttataattgataaggttttttgaatgtttaaagaaatatataatttaagatattttaatagatagttatgttttaaaaagttgttgattttagagttttttttaattgggattatattttagatcgtttttatggtttttatttttattttttagaagaaaaaagtagtttgttttttttttttcgggatagtaagagttagaaatgttagtttagaaaaatttttatgtaggtttcgaagtattttaggtttgattgtggtagggtagtagaatatttattttaattttaatttaaggaagttgaattttaaaggttttagaagatatttaattgtatgtgttattatttgataaatgtaatttataatttaagtagatagggtatagagcggttatgaggattaaaaaaaagaaatttgaaggttaatatttaagtatttggtaaaattgttatatttttggggattttgcggaagagggatttagaggaagatagagggattaatggagtattaaagggtaattaattaaagatataaacgtttttattttaagttattagtcgaagtatagttttaagtggtgtttttatgatggtgagtatttggatgataaatgaattaaaaaaaaaaaaaaaaaaaaaaaaaaagttgtgaagtatttagatgtttttaaatagtaggatgtttaaaatatttggattattgataagtttttttttttttttatttttaattaatattttcgtttttttgtatgatttggtgagaagaaatagtaatttgttattgttggattaattatttttcgtggttttaagttaaataagtggttagttaatggttatgtttatattttatagttaatgagtaacggtaagtttgggaaattttaacgatttaaatgatggtttgtgttgtaatgatatagagttgttgtgatataatttaattttggtttttataatagataaaaagaattttatatgaatgtttatttttatattagttttttggtatttttagtattgatattaattagtgagaagtaaaggttagttgggttatatatttttatttaaaaaaaaagaaaaagaaaagaattttggaggtagagtaggggaggtaggggagtgtgggttgcgtagatttttttagtttaaatttgttatttttaaatgagaaatttgagatttagaaaggtttagagttaattttgaatgagttggttatgattaattaggggattagtgatgggaatgatttgtgtattattatttgttttttttttgtttttatagttttatgatgttttttgtgatattttttttttttgggatatgtgtttaaattagtatttttttttttttttttgagatgatttttatataaataagggtgttttttattagtaattatattttagaagtagtttttttgagatggagagttttttttttatttagaaggattagaatttttaggaaataattatttttaattttatatttattttgtcgttcgattttttatttgttttaggattaagttttttttttagttttttaagtgtataaatttttttgttagatatacggtattgagaattagtaaggaggaagaattaaaataaatttaaatttttgttttttaaagtggtggttaggtgtttgtgttaaagtaaaagtttttattttggattttataagtatttgtagaattatagttttgtgatattttgggaaagattaagtttgttgtttaaatagtaatgtaaaatgtattaaagagttaggtaggttagatagagaattagaattaggtataagggaaaaaagttattttgaatagatagtaaaattaaatttattaataattaaaaatgatacgaggtagtgatatagaagttgatagtatagaaacggtattttagatgttagggaatttgaaatttatggtttttttttttagttataattgagtggttaaaataaggaatttaaatatatagatgtgggttttaaagtaaaattagtattatagatttagttatgttaattaagataaaaattagattttattaaaaaatttttgtaaaatagatattttttttttatggtggtattggttagtgtgttttataggtttagaataggaaatagagttgatggttgttgttttttttttttttgggtttgagattcgattaaggttcgtaggggaataatatattatgtaatgttagttttggtttatttatgatgagaaatatgaataaatgtgtgatttatattagaaattggcgaaaataggttatatatataagaaataggttaaatttaaaattataaattaaaaaggaaatggttgtaataataataaataagtaataattttaaagtattagtatttttttaagataaagtaagtttatttttgtaaataaagttaatagttataaaaatgtagtgtaagtttgaataataaaaaaaagattaaaatattagaattaaaatgaagtttaagtgtgtgtttgtaggggaaggaatttatttttatatttggtaaagtattattttagtatatggttttttaaagaaagaaattaaagttaattgagatcgatttaggaaggaaaaaatttttagaaatgttagagatgggggaggtatgttttttttttttgtattttaaaattttttttatagttaatattgtataaaaatgaggaagggaatataatttagaatattgaaagtaattttttagttgtttttgtttattagaagggaaaaattttgaaaataaggaagttttaggataaatattttaaaagaggtgaaatatagtttatattttgaaaagatagagtaatttaaattatgttttaaagattttgttgattgttatttaataaaggttgttgaatatttaggatgaagtatagtttaggaaaaggaaataaatgaataaagaaaattttttttatatatatattttgggagtaagaagaagttgaggggtttttatagatttatttttataatagcggttattaaagttaagtgttgttttttagaagtaaattaaggtatagttttgttatatttttgtttttttatttgatttggttgttggtaggttttattattttttcggttaaagtttgaatggatatacgttgttgtatagggttttttttgtttggtagttttgtgattttaaaggggagagaggatttagtttagtaggattaaaattagaaaaagagtgttgaatataggttgttaattaggattatatgagttttttaattttagttttgggagagattttttggttttgattgatatgtttttttttttttgtagtttggttttttttttttataattagtagattttatttatttatttatttgtttgtttatttgtcggttaaggtaggtagttgttttagttagtatgtatagattgttattgtagaaattttggttagttataaggtttgggatttgttttagtggttttataatagagaatattttaaacgttaaaatttggtagatatgtggtataattattttatatgtttgtttttatgttattataaaaagatttgaattttagattggtgtttgttaatgtgtggggtgtttttttttgtagttttaggaaagttgggatatttttattaggtaaatggtaggttattaagtttatttttaaataatttacgagaaatatataattttaagtaaattatttttaaataaaaggtattattgtgttagtattgtagtattgattattttattttaatacggaatatattaataatatatgaggattatttttttggattttggttatgggataatagttttagaaatgaagggaggttttattaggttatattttatattataattttaaaatatgtatttatttttaagtaattagagtataaaaaaggatttaaaatatattagaatattgaaaaagaaaattaataaagttgaatgtatattgatatttttagtaaagtattttaggaattttgatgtttttttataatagatgaatattttgtaagatgtttattttttaattaaagtattagaaaataaaggtttaaaattgattttaatttgtgatttttatagtttataaaaatattatattgttaatatagagaatttattatatttaattttttttgaaaatttgggagtggtaaagtgttgaaattgagaaaatttttaagaatggttaggtgaattttatatttggagtaagtaaaggtatttatggttttttcgtggtttttaaaaattaggaagatggttagaattaggtttttcgagaattggattattaaatttatttttaatgtttttaagttttatatgttataattatttgataattatgaaaaataaatggaataattaagtggaataagaattgtatgattatgattatgtttaaaaaaaaaaaaattttggttcgggtatggtggtttatttttgtaatttaagtattttgagaggttaaggtgggtgggttatgagtttaggagatcgagattatataaaaatttaaaaaaaaaataaagaaaaaaaaatagttaggcgtgatggtgggcgtttgtagttttagttatttaagagggtgaggtaggagaattgtttgaattcgggaagcggaggttgtagtgagtcgggattacgcgattgtattttagtcgaggtgatagagtgagattttattttaaaaaaataaaataaaataagaaataaaaaataaaaaaattttaaagaagtttttgttgttattataatatagtgtggagattatttatttaggaagttagtattatttttaattaatagtttattttttttgttagttttaattttattataatttaatataaaatttttttttaaattttttttatatataattacgtagaatttggtatattatttaattttttatattgttattttttaattatttt

SEQ ID NO: 475 - DNA, 1155 bp, Artificial Sequence
  chemically treated genomic DNA (Homo sapiens)
tttaggtattttagtttcggttgtttttttcgttatcgtcgtcgttcgtcggtaggtttcgtggttagcgttttatttcggtcggagttttttttaggcggtacgatgtcgaggaaatagtgattttgagcgaagttaagtcgggcggtagagtgagttagggtagggggttgtagcggtgggcgagggggcggcggttttttttcggcgggcgttttcgcggtttgaaaacggttttcgtcgttttgtttcgcggttcggagtttgtcggggtgagggtggcgaggggtggggcggttttttcgcgagacggttgttttgggaggatttttaagtttcggcgggttttgatttggtgggagagggtgggtagtgaatatagggtgggtttaagaagggtttagggtcggttttttggtcgtaggtaatttttttataagttatttagagatttggaggtgacgttttttcgtaggttgggaaggatttcgtagttagtttttcgttataaggaggtggttatagatacgtttgtgggagatatgggattattattcgagttgaatgaggtgtttagggtcggtgggaatttatatagattgttgtgtttaggagagtgtgtatattttatatagagagaatatttgatgaggtcgagaattttaaaggaattgtttttgttatcgaaatgtataagttataggaagtaaatatcgtttaaagaaaatgaaatttaggtttcgatttggtttttattagtaggaaaattgttgtatggaaatgtatattaaggaattgtttgtaaggatgaaatggaaaatgaaagtatagaaaagtaaggtaatgtgaggattttagaagtttttggatttggttagtaaggtgtaggttgtgtgaatagaagaatttattttgtttttttgatttagggagagaagagttagtggtgttaggttgttttttaggataggtttagttttggggcgggggttggagaagttttagggtagattttaaggttagggattgttttggagtggataaggtaagtttaaatgtgatttgtagatagaggacgattattgatttaagttttggtataatttatttgtttttttattgggttaattttaggcgttttttatatattacgta

SEQ ID NO: 476 - DNA, 1155 bp, Artificial Sequence
  chemically treated genomic DNA (Homo sapiens)
tacgtaatatataaagaacgtttaaaattggtttagtggaaaaatagatgaattatgttaggatttaaattaatgatcgttttttgtttataggttatatttaaatttgttttgtttattttagggtaatttttggttttggggtttgttttgggatttttttagttttcgttttaaaattgggtttgttttgggaggtagtttggtattattaatttttttttttttgggttaaaagagtaaggtgggtttttttgtttatatagtttgtattttgttaattagatttaaaggtttttgaggtttttatattgttttatttttttatgtttttattttttattttatttttataaatagttttttggtgtatatttttatataatagtttttttgttggtggaggttaggtcggaatttgggttttattttttttgagcgatgtttattttttgtagtttatgtatttcgatggtaaaaataatttttttggggttttcggttttattaaatattttttttatatagagtgtatatatttttttagatatagtagtttatgtggatttttatcgattttgggtattttatttagttcgggtagtggttttatgttttttataggcgtgtttgtaattatttttttatggcgaggaattggttgcggaattttttttagtttgcgggaggacgttatttttaagtttttgggtgatttgtagaggggttatttgcggttaagaggtcggttttggattttttttgggtttattttgtgtttattatttatttttttttattaggttaggattcgtcgaggtttggggatttttttagggtagtcgtttcgcgggagggtcgttttatttttcgttatttttatttcgataggtttcgggtcgcggggtagggcggcgggaatcgtttttaggtcgcggaagcgttcgtcgggaaggagtcgtcgttttttcgtttatcgttgtagttttttgttttggtttattttgtcgttcggtttggtttcgtttagggttattgttttttcggtatcgtgtcgtttggagagaatttcgatcgggatgggacgttgattacggaatttgtcggcgggcggcggcggtggcggagggggtagtcgggattggggtgtttagg

SEQ ID NO: 477 - DNA, 10183 bp, Artificial Sequence
  chemically treated genomic DNA (Homo sapiens)
atatatttatttgtttttttattttttttattaaattttgatgaaatgatttgatgttagagtaagatgaaagacgtggttataattgttttatgattgggaaaggttgtgaatttaatggggttttttttttgtttttttttttttgtatttttttgattatatttttttgtttataaataaagtgtagtaatatgttaagttatggagttaatatagttagtgatatattatttttattatatgtaataagttgttttaggtattttaaataatgttttttatatatttattattttgaaaataataaaaataaaatgattttttaaatgttaaataataaggattatttgagatcgtatatgtaaaaatgtggtagatttttagtaaatattaataggaaaatgatttaagttttttttattttattttttggtagaaatattggtataataaaggatatgtttttttagagggggaaaaaaaagataagttaattttttaaattttgaaattaaaaatgtattattgttgtaatgtatttcgaaatatattattaggaaagagaaagaaaaaaattaagacgtattagtgtaagtgatattaaagaaaatggtcggagatggaatttttgtttagtaatttaagaagtaaaggagttggtgggatagataggttgttttttttgtattgttgatgaaaataggaaattgaatttttatatattttttttttttataattaagaaaaaggtagaagaagtataaagagtttggttaaagatagaaatcgtagtgttttttgaaaattaatattaagaataaaaagttttatttaattatttgtagtaattaattagagaaaattttttattttttttttatttaggaatatttttgttattttgatagagatatttagttatttatttaattatttattaatttaatgaaaaaatatttattgagtatatagaggtgttagattttaggtatattgtgtgtgtgtggagagaagtgggtgaagtgagattaaaggaatattattttttttaaatttttttttttaatattattaaatttgtgggagaatattatttttttttataaggatttaatagtttagtgagggagataaaaagatttttttaaaaatgaagtatttgggttgggtgtggtggtttatgtttgtaattttagtattttgggaggttaaggcgggtggattatttgaggttaggagtttaggataagtttggttaatatggtgaaattttatttttattaaaaatataaaaattaggtcgggcgcggtggttgacgtttgtaatattagtattttgggaggtcgaggtgggcggattacgaggttaggagatcgagattattttggttaatacggtgaaattttatttttattaaaaatataaaaaattagtcgggcgaggtgacgggcgtttgtagttttagttattcgggaggttgaggtaggagaatggcgtgaattcgggaggcggagtttgtagtgagtcgagatcgcgttattgtattttagtttgggcgatagtgagatttcgttttaaaaataaataaataaataaataaataaataaataaataaaaattagttaggcgtggtggtgtatatttgtaattttagttatttgggagtttaggttggagaattttttgaatttggaggcggaggttgtagtgagttgagatcgtataattgtattttagtttgggtgataaagcgagattttgttttttttatttttttatattaaaaaaagaggcgtttttgttaggtacggtggtttaggtttataattttagtattttgggaggttaaggtaggagaatcgtaatagtttaggagtttgagattagtttggataatatggtgaaattttttttataaaaaatataaaaattagttaggggtggtggcgcgtgtttgtagttttagttattcgggaggtttaagcgggaggattatttgagtttaggaggttgaggttgtagtgagttgtgatcgcgttattgtattttagatttagtaatagagcgagattttgtttttaaaaaaaaaaaagaaaaaaaaaatgagttgttttattgagtttaattttgtttttttttaagggggaataataaaaataaaatatttatggagagaaggaaaatttaatgaaaataataataaaaatatattggaaaaagtaagtaatttggaattggattttagtttgatgattggttttttaatttttaaattggatggtttgaaatttgttatttaatatttttgtatatattggggatagtaatttttatttatttaatagagttgaagtttaaacgagaatattgtaatatgtttaaggttttaagagttgaattaataaagggaatttgatagagttagtttataatagagggaattggtagttttgttttaatggagggatttataagggatatagatagggattaatttttgtgggattaaagttttgaatcgaaggtagaaatgtagtcgttttataatttttttttttttttttaaaataagagtagtatttagattttttttattggttaatattgatgtttttgtatggtggtgttggtaaaagggatgacggataaagtattggatttagggtatttttgttatgtgattttgggtttacgttacgttttcgcgttttagtttttttatcggtaatacgaagattaaagttttttttaaattatgcgtttagtttttgtgaggatttaattcgaatgtatgtgaaaacgttttggaagcgttagagcgttaggtaaatattaagtttggtaatttttttttcgtaagaattaggcgttttaaagaggaggataatttttttgttttttttgttattttttttttttttcgatttttattaattttgtaatttataattatagtaatagttgatattttatagcggtttttggtattagattttcgggttttatttagatttatattattaagtcgtagcgtcggttgagatcgaaggaaaatttagtcgttttttattcgcgggcgggtattcgtttttaggttttattatttagagtttcggaagttaatttttatagttttggagtattgtttcgtttttttaagagggaaaataatatggcggtaaggaagaatggtaggggcgtgagttaattatcgtagaggtttagttttattcggtaaggttaagaggcggtattattggttaagatggatagttagagtaattaatagagcgatcggaaatgggggagagggcgggcgacgggaattttatatagcggttaaggtttttagagttaagggtttaaggattggtttggattataatttttttttttatttattttagagttttttattttatttttgttggttggtcgttttgtttgcggattatgtgataaggggaggaaggaggcggcggtggttgaacgcgtttgataggtcgggttagtgataaagagtcggcggtttaggttgaatttcgggaagcgattttttcgaggaggagagtttaagtttttttatagataggaaagacgtaatttacgttgtcgattacgataggttggttggcgattatatcgtaggattttatggtagaggaatttttttttttggggaaggaattgtttagtcgggttcgtcgttagcgttattgatacgtatgcgtagtttagtcgtcggtttagggcggcgagggagcggttcgatttcgtttttgaagaattataatttttagtaagttttgcgtttgggttagcgatttagtttgttttgttgttcgtttagtttaagattgggagtcgtatttttaatgcgtagtattttgggatttgtggtttttttagattaaatagttagagatataggttgatggttatgttgtatgtttggatttgtagtttttttgaaggagttcgtagtgtatgttgaggtatgtagttttttcgagtatttgtttgtagttcggtttggattggtcgtaatttatggatgtttggattttgtagattagttttgttatttttttcgacgtttttttagataatataaggtttttatgtttttatttgggtttgtaagattttaataaatattttttagtattttatattttaataaaaaggaaatgttaatatacgtacgcgagaggatatatttttataataaaggaaaataatttaaattgtataaaattagttttaagtttaaaaatttgtatattgtcgttgttttttgtattttttttttttttgtataataggttaatattgattcgaagattggtaattggaattattggtataggtaattttttggttattaaaatattatttaagggttttagaaattgttcgagtatttttttaatttttataacgagttagaattgatattgatggttgagaaaatggaggtgaagagaggttatgtgttattgtttttaaatgagtttagtgtatttttttttttggattatgtttttttttagtttttttgaaattttagggatttttttgttaatagttttagaaaatattagatttattattatttattaatattaacgttttatggatgaatgaattaatttattgttagatttatgtttaaattttagttagtagcgcgttagtaaaatagtaataaattttttgttggcgtatttttcgttgttttcgtgggattttagtattttagagggtgtttagtatttttaaatttgggttttttttaatattagggggagattaagagttttgggatatttttaatatagggaggggaggcggggtttattgttaagttatattttttttgtttgtgattggtatagatattagttaatgggtgtttggatagggtgcgtcggcgtttcgttttttttagcgtttcgtcgtttcgaggtattttttggtagattcggcggcggcgatagtttgggcggatagtgcgtcgtgcgtaggcgcggagttagatttcgttgtagtttttatcgtttcggggagttttatttatcgagttcgttcgttggttcgttagtgtttttttcgtcgtttgttttttttagtttttttagtgtttgttttacgtatttcgatggcggagttgcggtttagcggcgttttcggttttatcgcgttttcggtttttggttcgattgttttttcggttttcgtttcgttttttttttcgggattgtacgttatttacggagagtgtcgtcgtttttattttgattagtcgaattcgttttaggttatcgttatcgttaagtattggtatgttttgggtcgcggggagacggataggcgcgggttggaaagggttaaagcgtcgagggcgaagtaatttgtgggaggtgggaggaggggtagagaatggttaaagtatttagaaggagggttttttgttgcgagggaaggagttaaggtttaagttgggaatggggataaaggggttaacggagttcgtgggtattgaggggttaatcgggattaggagaatagagtgaggattgggggtgtgtgtaggagtagaggggggaacggtaggagcgagggaattgtaaacgtggtgaaaagagggggcgtttgtagggggttattagtgggcgaggggaagttaagcgggggcggtcgaagtgggatgggagaggcgaggcggggtttggggagtatttgagagggttttggaggagcgaagtcgaagaagtttagagggtacgagattgtatagaatggggggttcggggggtttagggtttttttgtggtgggtaggagggttaaagatgagggtttggtgtttgtggagagaggaggaggtttttttttgatattttttcgattagtttagacgtcgtattagggtaaagtttttgtttttgaagtttgacggagtagttttttttgataaattttttgtttattttgtattgtttttttttttcgtgtagagtttttttttagttttgtagttgtttcgttttagggtattaggtagagagaattatggtttggtttaggattgaaggggtcgatagttttttatttttagttggaaataaatggtggagattttgggattttagtagggaggaattgtgtagtgggatattaagaggagtttttcggttatggtttgtagttttttcggggagttgagagtaatttttaagtagttttagggtaggaatggttttttttaattttttatttttgtttgtagtttgtttttttttttagtatttgggtagaatagatgttttggggattttggaaaagaatttgtttttaaagttttgttggattaaaaattgagatattggttgaaattgtttaggattatatttatgtaggtattgtgtaagatgatttttaatgagttttgaaagattgttttgtagttgtttgggggtgtagttaaagggtagatttgaaggggtaagtggatatttttgttggttatttttttttttaggattgagttttttttttggtgaaaatttgttgttttttttggatatcggtgttagtaggttgtgtagggttgaggttagttgttcgtattaatgggaggatgttaagaggttaatagcgtggagagtttggggattagttatttgttgtttagggaggattgtagggaatagttttttttgttagagtagacgggaggaggtggaattggtgtcgtagtttttttttattggcgaattgttttttggttgagaggagttgttgaagagcgtttttgagtggaaagtagtttttgttagtttaatgatttatttttattgtgtttttatatttaattatgtgttgtgatgaatttgttgttatgtgttaggagaaaagtgggtttgggttgggtatagtggtttatgtatgtatttttattattttgggaggttttgaggattttttgaggttaggagttcgagattagtgtggggagcgtagttagattttaattttgttatttgaaaaaaaaaaaaaaaaaaaaaaaaaaagaagtgggtttggttttgttacgttgtttgtttaggttttatttgagtgtgaggagaaatttttatatagatttaggtaattatttttatgttatttaagtagttataaaggatagaattgtatgtaaaaggtatgaaagtatgtgtaaaggattaagggtaattttttttttttttttgttgtaagtttgttaatagttatatttttagagatgggttaatatgtgataatgaagaaaagggattatatagtattttgtgaaagttttttttagatgtagaaaagtataaagagaaatagtatagtgattggtatttttttttttttttgagatagagttttgttttgttatttaggttggagtgtagtggtacgattttggtttattgtaatttttgtttttcggttttaagcgattttcgtgttttagttttttaagtagttgatattataggtatacgttattttgtttagttaatttttgtatttttagtagaggtagagttttattatgttggttaggttggtttcgaatttttgattttaagtgattaatttatttcggttttttaaagtgttaggattataggcgtgagttagtgcgattagttattagtgattggtattttttaagatgtggaggggtttgtaaaaataagattttgaaatttatttatattttttatatttgggattttacgaggtttttagtaggatgattgatttaggttgtttgggtttgtttgtggtttagggtagtttgggatttattttgtaatagtagtgtggttttgtgattggtgatttttgagtagtggggatattttaattgaaagttgagattttggtgagtaaggattaaagtagagaggtagaatttgtatttatggtttattttagttttgtaattgttttgtagagagaagttgggtgtttaaggaattaagttgagggatgttttgggattttggataatattatttgttaagtgtaaaatgcgatttttttttatatatttatttggtttttgagtagtaagtaaatagaatattttgtgtttggggatagggttaattttatttgatttttggtagttttttgtagttggagtttgaaggttaagtttttttttttgatgtgatattttgtgggagatttggtgagaaagagggttgtagggatgttgtagatggagtagagaatggtaaatatagttttgtagtttggtgtaggatggatttaggttgtagcggggtaggtttggaaatttgtagtaggaaattggagtaggtatggggtttgtagtggtttttatttgttttggagttttgtagttttaatggggtttttttagggatttttatttttttttttttttttttgttttataaatttttttaaatttaatttgttgtagaattagttaagtgatttgttgaaattagttaaggtagatatggagagttgtttttttttttttgttgagatgttaagttatttgtagtaatttttttaaaagttttataaataatttagtattttttaatagagaatagggatttttatttataaaggtaaataatattttggtgaaagaggacgaaataagattaattggttttaaatagtgtttaaattgtttggtgttggtattattgattgggattatttgtaatatgttttttatttggttgttagttttttattagtatgttattttagttgtaaagtgtattttatcgatgttttaggggtaggtgaagtttttgtagtttgtggaatggttagatgtttgaggtagtttaaatgtcgtgtttgtgggttaaatgtagatttttttttattgatggtttttatttggtttatttttttagttattaaaattttttatttatttttttttttttttttttttttagataaagttttattttgttatttaggttggagtgtagtggcgtaattttggttttttgtaatttttgtttttgttgtttaggcgatttttttgttttagttttttaaatagtaaatagttgggattataggtatttgttattatatttggttaattttttgtatttttagtagagatggggttttattatgttggttaggttggttttaaatttttgattttaagtaatttatttatttcggttttttaaagtgtagagattataggtgtgagttatcgtgttcggttaaaataggattttttttaaaaagtattgattattaaagggaatttttattgtattaaatttttagagtgagataataattgaatttttttcgtaatttttttttagttgaatggtgggggaaatttaatgtggttttgagaggttttaaattatttattattttagttttatttttgatgtggtagttttttttgggattattttttgggtgtagatgtttatagggcgtagtttgattttttttgtagttttttgtgtagaattaagttaagtttaagtttggtttttgttatttgtaatgataagagattagttttggtttatggggtgtaggttggtgttagtatagattagaggttttgggtttgtttagaataaattgtaattaatatagggtataatatagttttttaggaattagttgtttaagaggttggagtggagtagagtttttgtttttaggaataatgtttattggggatgtttgggatggttttttaatagaggttaattgattgattgatgtattttttgttttgaagtttggtatgtatataggtattatagaagagagataatttttgttaattttatttgggatcggtaatttgaaataggagaaagtaaaatgggtaattatttagtttgttttatttttaaaagaggtttagttttttaggggtaggagaagggagttttttgggtttgtagagttgggtagttttagttgtttattttttagttttattttggagagatgtggtttttgtttagttattttttatttaggtttttttaggatgggttttttaggtttataaagtagagcgttttagtttgatattgtttgatttttaggtttatattaatatttttgtgttttgttttttgtagg

SEQ ID NO: 478 - DNA, 10183 bp, Artificial Sequence
  chemically treated genomic DNA (Homo sapiens)
tttgtaaaaaataaaatataggggtgttagtgtaagtttggaaattagataatgttaagttaaggcgttttattttgtaaatttaaaggatttattttggaggaatttgggtgaaaggtaattaaatagaggttatatttttttagaatgagattaagggatggatagttaaggttgtttaattttgtaagtttaagaggttttttttttttatttttgaaagattgggttttttttagaaataaaatagattggatggttatttattttgtttttttttgttttaaattatcgattttaaatgagattggtagggattgttttttttttgtggtgtttgtatatatgttaagttttaaggtaagaggtatattagttaattaattggtttttgttgaaagattattttaagtatttttaatgggtattgtttttggaagtagaggttttgttttattttagttttttagatagttaatttttgaaagattatattgtgttttatgttaattatagtttgttttaaataaatttaaagtttttagtttgtgttgatattagtttgtattttatagattaaagttggttttttattattgtaagtgataaaggttaaatttaggtttaatttagttttgtatagagaattgtagaaggagttaaattgcgttttgtgagtatttgtatttagaaaatgattttaggagagattgttatattaaaggtagagttgggatggtaaatgatttggggttttttaggattatattaaattttttttattatttaattgagaaggagttgcggaagagatttagttattattttattttgaggatttaatataataagagttttttttagtaattagtgttttttaaaaaaaattttgttttggtcgggtacggtggtttatatttgtaatttttgtattttgggaggtcgaagtgggtggattatttgaggttaggagtttgagattagtttggttaatatggtgaaattttatttttattaaagatataaaaaattagttaggtgtggtggtaggtgtttgtaattttagttatttgttatttgagaggttgaggtaggagaatcgtttggataatagaggtagaggttgtagggagttaagattgcgttattgtattttagtttgggtgatagagtgagattttgtttaaaaaaaaaaaaaaaaaaaaaaatggataagaaattttggtagttagagaaatagattaaatagaaattattagtggaaggaagtttgtatttagtttataaatacggtatttgagttgttttaaatatttgattattttatagattgtaaaagttttatttgtttttgggatatcgatggagtatattttgtaattgggatagtatgttggtggaaagttaataattaaataaaagatatgttataagtgattttagttaatggtgttagtattaggtaatttaaatattatttaaaattagttggttttgtttcgtttttttttattaggatattatttgtttttgtggatagaaatttttattttttgttaggaaatgttaagttatttatagaatttttaagaaagttgttataaatagtttagtattttaatagaggaagagggataattttttatgtttgttttaattgattttaataaattatttgattaattttataataggttggatttagaaaagtttgtggggtaagggaagaaagaaaagagtagagatttttggaaagattttattagagttatagaattttagagtagatgagagttattataggttttatatttgttttagttttttgttgtaaatttttaaatttgtttcgttatagtttaggtttattttgtattaagttgtaaaattgtgtttattattttttgttttatttgtagtatttttgtagtttttttttttattaagttttttataaggtgttatattaaggagagaagtttaatttttaaattttaattgtaaggaattattaagagttagataaaattaattttgtttttaagtatagagtattttgtttatttattatttagaggttagatgagtatgtggaaaaaaatcgtattttatatttagtaaatgatgttatttaaggttttagggtattttttaatttaattttttgaatatttaatttttttttgtagggtagttgtaggattgaagtgggttatgagtataggttttgtttttttgttttgatttttgtttattaaagttttagtttttagttagaatgtttttattatttagggattattagttatagagttatattgttattgtaaaatgaattttaagttattttgggttatagatagatttagatagtttgggttagttattttgttagaaatttcgtgggattttaaatgtgaggaatataaatgaattttaggattttatttttgtaaatttttttatattttagaaagtattagttattgatggttggtcgtattggtttacgtttgtaattttagtattttgggaggtcgaggtgggttgattatttgaggttaggagttcgagattagtttggttaatatggtgaaattttgtttttattaaaaatataaaaattagttgggtaaggtggcgtgtgtttgtaatattagttatttgggaggttgaggtacgagaatcgtttgaaatcgggagatagaggttgtagtaagttaagatcgtgttattgtattttagtttgggtgatagagtaaaattttgttttaaaaaaaaaagaaagtattagttattgtgttgtttttttttatatttttttgtatttaggaagggtttttataaagtgttgtataattttttttttttattattatatgttggtttatttttgaagatatggttgttaataagtttgtagtaggaaggaaaaaaaaattgtttttagttttttgtatatgtttttatattttttatatataattttattttttatggttatttgggtgatataaaaatagttgtttgaatttgtgtagggatttttttttatatttaaatgaggtttgaataaatagcgtggtagagttaggtttattttttttttttttttttttttttttttttttaaataatagagttagggtttggttacgttttttatattggtttcgaatttttggttttaagggatttttaaggttttttaaagtggtgggaatatatgtatgagttattgtgtttagtttaggtttattttttttttgatatatgataataagtttattataatatatagttaaatataaaggtataatgagaatgggttattaagttagtaagagttgttttttatttagaagcgttttttaataattttttttaattagagaatagttcgttagtgagagaggattgcgatattagttttattttttttcgtttattttgatagaggaggttgttttttataattttttttagatagtaggtggttggtttttaggttttttacgttgttggttttttggtatttttttattgatgcgggtagttggttttagttttgtatagtttattgatatcgatgtttaggggaagtaataggtttttattaggaggaagatttagttttaaaaggagaggtaattagtaaagatgtttatttgtttttttaggtttattttttggttatatttttaagtagttgtagaatagttttttaagatttattgaagattattttatataatgtttgtatgaatgtggttttggatagttttaattaatattttagtttttggtttagtaagattttgaggataggtttttttttagagtttttagaatatttgttttgtttaaatgttgaaggaagaaataggttgtaaataggaatgggaaattagaaaagattatttttattttaaagttatttgagggttatttttagtttttcggagaaattgtaggttatggtcgagaagttttttttaatgttttattgtataatttttttttgttggggttttagagtttttattatttatttttaattggaggtgggaagttgtcggtttttttaattttaagttaaattatggttttttttatttaatgttttaaagcgaagtaattgtagagttaggaggaagttttgtacggagaaagagaatagtgtagagtaagtaaaaagtttattaggaagagttgtttcgttaaattttaaaagtaaaagttttgttttgatacgacgtttgagttaatcgggaaggtattaaaaggagatttttttttttttttataagtattaggtttttatttttggtttttttatttattataggagagttttgggtttttcgaattttttattttatgtagtttcgtgttttttgagttttttcggtttcgtttttttaaagtttttttaaatgttttttaggtttcgtttcgttttttttattttatttcggtcgttttcgtttggttttttttcgtttattaatgattttttataggcgttttttttttttattacgtttatagttttttcgtttttgtcgtttttttttttgtttttatatatatttttagtttttattttatttttttaatttcggttaattttttagtatttacgggtttcgttaatttttttgtttttatttttaatttgagttttaattttttttttcgtagtaagaagttttttttttgagtgttttaattattttttatttttttttttattttttataaattatttcgttttcggcgttttaattttttttagttcgcgtttgttcgttttttcgcggtttagagtatattagtatttgacgatagcggtaatttggagcgggttcggttggttagggtaaaggcggcggtatttttcgtagatggcgtgtagtttcgggggaaagagcgaagcgaaggtcgggggggtagtcgggttaggggtcgggggcgcggtggggtcgggggcgtcgttaggtcgtagtttcgttatcggggtgcgtagggtaggtattgggggaattggagagggtaaacgacggggagagtattgacgggttagcgggcggattcggtgggtgagatttttcgaggcgatgggggttgtagcgaggtttagtttcgcgtttgcgtacggcgtattgttcgtttaggttgtcgtcgtcgtcgagtttgttagagggtgtttcggggcggcggggcgttaaggggggcggggcgtcggcgtattttatttaagtatttattggttaatgtttgtgttagttataggtagggaaggtgtgatttgataataggtttcgttttttttttttgtgttgggagtgttttaaggtttttggtttttttttagtgttaggaggaatttaagtttagagatgttgagtattttttgaggtgttaaggttttacgaaagtagcgagaagtgcgttaataaaggatttgttattgttttgttgacgcgttgttaattaggatttaaatataaatttgataatggattgatttatttatttatggggcgttagtattaatagatgataataaatttaatgttttttagggttattgataaaaaggtttttgaaattttaagggggttgggggagaatataatttagagaaaaaaatgtattgggtttatttgaaagtagtgatatataatttttttttatttttatttttttaattattagtgttaattttagttcgttatgaaaattaaagagatattcgagtagtttttgaaatttttagatgatgttttaatgattaaaagattatttatattagtagttttaattgttaattttcggattaatgttagtttgttatgtagaaaaaaagaaaatgtaaaaggtaacgataatgtataggtttttaaatttaaagttaattttatgtaatttaaattgtttttttttgttgtaggaatatgttttttcgcgtacgtgtgttaatattttttttttgttagagtgtgaggtgttaggagatgtttattaaagttttatagatttaaataaaaatatgagaattttatattgtttaagggaacgtcggggggagtggtagggttgatttgtaaaatttaaatatttatgaattacgattaatttaaatcgaattatagataagtattcgagaagattatatattttagtatgtattgcgaatttttttaaagggattatagatttaggtatgtaatatgattattaatttgtgtttttggttgtttaatttagggagattataaattttagggtattgcgtattggaaatgcgatttttaattttaaattaggcgggtaataaagtaagttagatcgttaatttaggcgtaaagtttgttggggattgtagttttttagaggcgaggtcgggtcgttttttcgtcgttttgaatcggcggttagattgcgtatgcgtgttagtggcgttagcggcggattcggttgggtagttttttttttagaaggagagatttttttgttatggagttttacgatgtgatcgttaattagtttgtcgtgatcgataacgtgagttgcgttttttttatttataaggggatttgggttttttttttcgaaaggatcgtttttcggggtttagtttgagtcgtcggttttttgttattggttcggtttgttaggcgcgtttagttatcgtcgttttttttttttttttattatatagttcgtaggtaaggcggttagttagtaaaagtgggatggagaattttggagtggataaaggaaagagttatagtttaagttagtttttgggtttttggttttaggggttttaatcgttgtgtgagattttcgtcgttcgtttttttttttattttcgatcgttttattggttgttttggttgtttattttagttaatgatatcgttttttagttttgtcggatgaggttaggtttttgcggtgattggtttacgtttttgttatttttttttgtcgttatattgtttttttttttgaaggggcggggtagtgttttagggttgtggggattggttttcgggattttgggtggtggggtttagaggcgagtgttcgttcgcgggtggagaacggttaagttttttttcggttttagtcggcgttgcggtttggtggtgtggatttgggtggggttcgagaatttggtgttagaaatcgttgtaggatgttagttattattgtgattataaattataaagttggtaaaggtcgagaagaaaggagagtgataaaggaagtagagaggttgtttttttttttggaacgtttagtttttacggggaaaaaattattaaatttaatatttgtttggcgttttagcgtttttagggcgtttttatatatattcgagttggatttttataaaaattggacgtatagtttaaaaggaattttgattttcgtgttatcgatgagaaaattgaagcgcgaagacgtaacgtgagtttaaggttatatagtagaggtgttttaaatttagtattttattcgttattttttttgttagtattattatgtagaagtattaatattgattaatagaaagaatttaaatattgtttttattttggggggaaaggagaaaattgtaaaacgattgtatttttgttttcgatttaaagttttggttttatagagattgatttttgtttgtgttttttgtaggtttttttattgaggtaaaattattagttttttttgttgtaagttgattttgttagattttttttgttgatttagtttttgggattttaggtatattataatgttttcgtttaagttttagttttgttaggtagataggaattattatttttagtgtatgtagggatgttaaataatagattttaaattatttagtttaggaattgaggagttagttattagattaagatttagttttaagttgtttgttttttttaatatatttttgttgttgtttttattaaattttttttttttttatgggtattttgtttttattatttttttttagaaaggggtaggattgagtttaatgagatagtttatttttttttttttttttttttttggagatagggtttcgttttgttgttgagtttgaaatgtagtggcgcgattatagtttattgtagttttaattttttgggtttaagtgattttttcgtttaagtttttcgagtagttggggttgtaggtacgcgttattatttttggttaatttttgtattttttgtaggaagggttttattatgttgtttaggttggttttaaatttttgggttgttgcgatttttttattttggttttttaaagtgttgggattataggtttgagttatcgtgtttggtagagacgtttttttttttggtgtgggggggtggagggaataggatttcgttttgttatttaggttggagtgtaattgtgcgattttagtttattgtagttttcgtttttaggtttaagagattttttagtttagatttttaagtagttgggattatagatgtgtattattacgtttggttaatttttgtttgtttgtttgtttgtttgtttgtttgtttgtttttgagacggagttttattgtcgtttaggttggagtgtagtggcgcgatttcggtttattgtaagtttcgtttttcgggtttacgttatttttttgttttagtttttcgagtagttgggattataggcgttcgttatttcgttcggttaattttttgtatttttagtagagatggggttttatcgtgttagttaggatggtttcgattttttgatttcgtgattcgtttatttcggttttttaaagtgttggtattataggcgttagttatcgcgttcggtttaatttttgtatttttagtagagatggggttttattatattggttagatttgttttgaatttttgattttaaatgatttattcgttttggttttttaaagtgttgggattataagtatgagttattatatttagtttagatattttatttttgagaggatttttttgttttttttattagattattaaatttttgtggaaaaagatgatatttttttataggtttagtggtgttgggaaaaaaaatttaagaaagatgatatttttttagttttattttatttatttttttttatatatatatagtatatttagggtttggtatttttgtgtgtttaataaatgtttttttattggattgatgggtgattggatgaatgattgaatatttttattaaagtaataaagatatttttaaataaagaaaagatggggagttttttttagttagttattgtagataattgagtaggattttttgtttttgatgttgatttttagagagtattacgatttttgtttttagttaggttttttgtgttttttttgttttttttttagttgtaaaaaggaaaaatatatagaaatttaattttttgtttttattagtaatgtagaaggaataatttgtttattttattagtttttttgttttttgaattgttaggtaggagttttattttcggttattttttttaatattatttatattaatgcgttttaattttttttttttttttttttggtagtatgtttcgaaatgtattatagtagtgatgtatttttagttttaagatttaaagaattgatttgttttttttttttttttttgggaaaatatgttttttattatgttagtatttttgttaaaaggtgaagtaggagaaatttaagttatttttttattagtatttgttgaaaatttgttatatttttatatgtgcggttttaggtagtttttgttgtttaatatttggggggttattttgtttttattatttttaagatggtagatgtataggaaatattatttgaaatatttgagataatttattatatataatgagaataatgtattattagttatgttaattttatagtttaatatgttgttatattttatttatgggtagaagagtataattaaaagaatgtaggagaaagaaagtagggaaagagttttattaagtttatagttttttttaattataagataattgtgattacgttttttattttattttggtattaagttattttattagaatttaatgaggaaaatggaggggtaggtaggtgtgt

SEQ ID NO: 479 - DNA, 10296 bp, Artificial Sequence
  chemically treated genomic DNA (Homo sapiens)
cggtaattttttattttcgtagtttttataaatgggtttttgagatgtcgggttagttataggtgtttagcgtttgttcgatttttgtagcgatttttaatagtgtggaatttttgacgttgaaaggaaatatatattagttttaagtatttggtgggagagaagaggagtaggtaggttggtattatatagaacggtaggttatgagttgggagggttttcggattaatttatttatttttagagatggggtattaaggtttaggaggggaggtgaattgataaggttatatagatggaaagtaggtattataggttaaattgtgttttcgtaaaattaatgtgttgatgttttaatttttggtattttagaatatgggggtattcggagatatttgtaattttagtatttttggaggttaagataggtggattttttgaggttaggatttcgagattagtttggttaatcgtggttaatatgatgaaatttcgtttttattaaaatgtaaaaattagtttggcgtggtggtagatgtttataaatttagttattcgggaggttgaagtaggagaatcgtttgaatttaggaggtagaggttgtagtgagtcgagattgcgttattgtattttagtttgggcgatagagcgagattttgttttaaataataattaaatatattaattaattaattaaagtaatattatttttttatttggtaaaaatgtttattgggttttgataggttgtaagaaaattttataaggatagatttttgttttagtgatttagttttagggttttgatagttagtatagagggtttggtttgttatattttttttttttttttttttttcgagatagggtttcgttttatagtttaggttggagtgtagtggtgaggttacggtttaacgtagattcgaatttttgggtttaaataatttttttatttatatgttttaaataaaattgaattaaatttgtgttaatcgttgaaggataatttttaagattttttagataattgttataataaatgtaataatttatttatagtttataatagttaagtaggtggaagttatatatatttttttttgtttaattttgataataattttattaaggaagttttatgttttttttttttttttttaagacggagttttattttggcgtttaggttggagtgtagtgatagtttattgtagttttcgattttcgggtttaagtaatttttttgttttagttttttaagtagttgggattataggtatatttgttattatgttcggttaatgtttgtatttttagtatagatgggttttattatgttggttaggttggttttaaatttttgattttcgttgatttgttcgttttggttttttaaagtgttgggattataggtgtaagttattgtatttaggtattttttttttttttttgtttttttagagatagggttttattattatttaggttggagtgtagtggtatgattatagttgattgtagttatagtttttggggtttaagtgaattttttattttagttttttgagtagttgagattataggtgtgtgttattattttcggttaatttttttatttttagtagagatgggattttattatgttggtcgagttggtttcgaatttttgatttttggcgattagttattttggttttttaaagtgttgggattataggcgtgaattattttattcggttatttttgttttgttattatttaggttggagttgtagtggtataattatagttgattgttgttataatttttgggttttaagtgaattttttattttagttttttgagtagttgggattataggtgtgtattattatgtttgggttaattttttttttttttttaatttttaaaaattttttttagagatggtattttattatattgtttaggttggtttcgaatttttaggtttaaacgatttttttgttttagatttttaaagtgttgggatgataggtgtgggttattaagttcggtttttatgtttatttttttgatttaaataaataaataaaagttattatttttatggttttaaggttaaagtttttagtttttgtaatattaaagcgtgttgataagttaggaggtattgattgttgatcgtgagtcgttgtttttttttcgtttaaggggtttttcgggaaaatggtataagtcggtttcgggggttagggtttattcgatagtttaggaagcgcgggtaatggagttattcggtttagaagcgaaatttcgtttcgggttcgttttcggcgttttggatttgggtttcggcgttgcgttttttatttggatttcgtcgtcggtttcggtttttttacggtttcgtcggttttgtttttggagatttgagggcgtttttttttcggggaattgcgattcggaattttggtttcgtttttgtcgcgttcgttgagtgcggggacggtgtttagcgttcggtatttagtttcgaggttaggatcgaggaaggcgatcgggcggatttttaattattttcgttgtttgtacgcgtagtagtagcgtttagtttatttcgttattggtgtttttcgcgtttgtagcgcgtcgtcggaagtgtttggttttattttcggttagaggttacgttttcggaagcggcggtgtaggtacgaaaagcgcgcgcggggattttaggagtcgtggtgattagggaggggagtcgggttagcggcggtaggagattaggggagttgagttatgtgtttgggggagagcggggtcgggagttcgaaggagattagaagagtagggtcgggggttcgagggagacgaggagagcggggtcgggggtttgggagagagataaggagagcggggcggaggtttgggggagattaggagtaaattataaaaatttattttggaaatcgtggtttttggtagaaatagattagtgtcgggataaagtatacgggtttggtgtgaaattaagttataaatttatttattttgtttgatttgttttcgttattaggatttagttttagtgaaatgggaaaggtttttttgtttttttcgaagggcgtgcgatgaggatgtggtttatttttttagtgtttcgttttttaagtttttaggggaatatatagataggtaggttgaggggtttttattttacggtagtgtttaggggtgaatgtttgtagtttttgaagttttagtaggtatgtgttagagggtgtttttttagtttagttttgtaggtggtttgtgttagttagttgttagattttttgttttatcgtaaggatagagggttttttgtatttttaggttttttgttttgatgtattggagtaattagattatacggcggtttggagagtgagtgtaaggttttatgagtggaattagtttttagtagatgggggagttagaaggtagttggagtgggaaggtgatttttttttggagtcgggttgttgagtagtttgggtttttttttgatcgtttttgttaaatttatggttttattagttgatggtttgttggtgtttgttggtgtgttttttacgtttttttgacgtttagcggtttgtgtttttgtttattataaaaaattattggggtttttttataggtataggacggggacgtggcgggttcgggaaatgtaatatttgggtaaaaaaatagaaatgtttgtttttatttaggtttttgggtataggtttgggtgtggagttttggttagagattacgtttttttttatttagtatttttttgtttttttttttattatttggtttttttttttagatattataatttttaagaaggattattggttttgaattttgtgttttgtttaggtgtggattttagaaaagttggttttggttgggcgtagtggtttacgtttgtaattttagtattttgggaggttgaggtgggtggatcgtttgagtttaggagttcgtgattagtttgggtaacgtgataaaattttatttttattaaaaatatagaaattagttgggtgtggcggtttatgtttgtggttttagttatgtgggatgttgaggtaggaggatggttttagttagggaggcggaggttatagtgaatcgcgattacgttatttttttttagtttgggtaatagagtaggattttgttttaaaataaataaaggaaagttggttttggttttttagtatttttttagggttttttttttagtagggatttggcggaggtatcgtttttagagttttttggatttggatttgtatatttatgggagtaggaaggatttttgtgatttttagtggtttttttgggtgttaggttttatagtagttatagtaggagtagagtgggtggggtataaatttttattataggagggaggattagtcgggtttggttgggtggatttgtgtttatagttatatattttttgggaatttggaagtttgttatagagaggttaggttttattagattgaaagaagtttttgttaatttaaaggtttgatttgaggattataggataaattgcgtggttattttggtgttaattaggtacggggattgttgttttttattgtgtgtttataagtagggggtttttgggggtagacgtaggagtaagagtacgttttggaaaggtgatgttgttttttgtatttgagtattgatttgtggagaaggaaggtagcgtcggtttttgttttgtttgattagttttgttgattattgggttttgtttttattttagaaaattattggtttaatggtagttttttatttgttataagggaagttatacgtggtagggttggggagttatagtatattttttcgttttttattgttttttagagtacgtttttttttttttggtttttggtacgtgttttttttacgtacgttatggttgattttgtttttttattttttttttagaatttagggattatgggcgtttttaggttttatattttggtgttggttttgtagttttagcgagtttttttgggtatgaaaaagcgaggtttcggggtcggtcggtggaatggttttgggggtaaagtgtaagaaggagagattatcgaggatggggttaggaggtaaggatggggtaggtttggttatagaatcggtttttttagggtatagggattcgggttgtagggttatatttttggttttattattaagagttaagtgatttggagtagggggttaagcgtgagttttagtgtttttattttagaatgaagaatagttcgtagtttttcggatttttgtgaagataaaatgaggaaatgaattcgaaggatttagaacggtgcgcggtgtgcggtgcgtgttgagtgcgtgttagttgttgtggtgcggtggtgttgggggttgtagggcgtatttggaagtttttgtgtagtagtttgaattgaatttttttagtatttttattgttgtcgaagggttcgttagttatttggtttttttgtttgtttagtggagttgatgatcgtttttattttatattcgttgtgtataaagttttattgtatttttaatatagttagttttatttaggaaggaattgaagtttagagaggttgagtcgtttatttaagattatatagttttttagacgttttttaatttttatagggtaaatgagattatttgtgtaaatatcgttgtatagacgttagttttcgttcgtgtttttgttttgagaaaggtaggttagtttgtttggagaggagaattatagagtaaagagggttttggtacggaggaaagttaggacgttgtagtttagtggttttttaatttttttattataatttgtagtaagaaatacgttttgtattttgatagagtgtatatatttaggtgtgtaggtatagttaaagtaagttgtagtagtcgtttttattatataaaagggggttttattttttcgatttatttttttttttttttttagaggtgggattttatttatggtatatttttggtttattgtagttttaaatttttgggtttaaacgatttttttgttttagttttacgaatagttgggattataggtatatgttattacgtttagttcgttttttaattttttgtagagatggtgttttattaatttttaggtttaagcgattttttttttcgggttttttagagtgttgagattgtaggtgtgggttattggtttgattttttttttttttttaattgtaatttattaagtcgatttttcggggtatatgggttttaatttttagtttggagagttttgtgtgtgttttttttttaaggtttgggattttagatcgtagttatacggatacgttcgattagttattgtggtaggtgttagtgcgataggttttgtgttgggggtcgtagttggggaggaggattattgggtgtgagtcgggtatatagcgtgtttttgttaggagtgtgtgtagagcgattatagtataggaaataggaaaggtggtttcgggggttttttgtttagttttttgtttttgatttgttaagattgtttattagtttatggatttttgtagcgttgttttgtgtggggtttggggatatgaggaggaataggttagtttttgtttttgtggagttttcgtgttatttggttgtcgggtttaggagatttgtagaaggaggtttggtttatatttcgtggttaggggtttttaggagaaaggaagggagaataattgggtattaggaaaatgttttgagggtttgacgttggttgggagagtgtggaaggagggaggaaggagatatttgtagaagtatagagggttggaggagcgttagttgtgtagagaagtggtgggtgtgagtggagtaggtagcggtgttgaggaggttggatggaggaattttaggtggttggattttcgtttttcgttttgttggtgataagtaaagtataggttttttcggtagttttgttttatttttttttgaattttgttacggtcgaaggaattttttttttattttttgtaaatattatataaatagagggattattattttagatttttaaagttgaatatagtggtggtttgttgttagattagggtttgagggggggaattgaggtatagagtcggaagtttgtgatttttattttcgggtgtaatttggagacgggggttttattatgttggttaggttggttttgaatatttgattttacgggatttattcgtttcggttttttaaagtgttgtgattataggcgtgagttatcgtgtttagtcgagattttgttttaaagaaagaaagaaaaaaatttttcgttggggagtatttgtaagtatgaggaatgggggatattggagttagataggttggtgtttaggggttttagggtttcgggaatttagtagtaaatagtttcgtttttaggggatgacgtattattagttataggttattagtacggttttgggttttagtatttgcgagtttgaatggatttgtttttggggtaattttaggttcgtgttgtttaggagcgggaggtagggaggagcgtcggtagttcggtttttggggaggttggtttttgttttatttacgtaatatttagttttattttattaggaggattttaagatgggttttaatttttaggttaagagtcggtttaggtatttttttcgtttgtttgtagggggtaggtttgagcgtttaattttagtttagagggttggatttagatttttttttgtggggtaggggataggtacgtagggagtattgaattgtgggggtgtgtagatttgggttttaggcgtatagtgtgagtcgatttttttagatagtatttttggtttttaaagattagcgaggtcggggatataggagtagcgatgggaagtaggttcgtcggaattttcgatttttatttttttacgttacggacgttgtattattttgtgtttttgttttatgtattttttattttgtttttcgtgtttcgtttggggaatcgagtgttatggatagagtagatatttgggtagaattgaatagcgttattttcgtttgtttggcgttttttgtttgggaaatggagttttagttttgtttttcggcggatttttgatgttttttacgttgttatgtgttagggaagattaattaaaattagttataatattttattgggaggtgacgttttttaagacgagtaatagtcggtcgttaagaggcgggtgaggttttattgagtatttttattgtatttaattggggagttatttatatttaagtagaagtatacgtttattttgtagtttaagtttaattttaattagttatttgtatgaataaatgttgattttaggttcgttttttttttagtttttgtagtttaagttgaggaggtatcgtttaaattagattatttagattaggtatggtggtttatatttgaaattttagtattttgggaggttaaagtagaaggatcgtttgagtttaggagtttaggattagtttgggtaatatagtaagattttgtttttatagaaaaatatatatatagaaaaattagtcgggtatggtaagaggaggagattgaggtgtttagcggttgtagttcgtgtatttttagggttttagtatagagtgggtgtttagaagtgtttgttgagggattgagtaagaattcgattgagtatagtaagtaaacgtttagaacgggaggttagtagtatcgttgtgtttaatacgggtttttattataattcgaagttggaacgttttatttttttatattaaataggagttgagaaggcggttgggttttttgaggtgtggaatgttatgtatttttttttttttgcgtggaaagttcgaggtataaagtgtgtatgatgtttgtttttttttttttttttttttttaagatagggtttagttcggttgtttaggttggagtgtagtggagtaattttagtttattgtagtttttaatttttgggtttaagtattttttttattttagttttttgaggagttgggattataggcgagtgttattatgtttagttaatttttgttttttttgtagaaatagggttttgttatattgtttaagttggttttaaatttcggagtttaagtaattaatttttttattttggtttttaaaaatgttgggattataggtatgagttattttgtatttaatttgtttgtatttttattttttaattttaagttattaagggttaatgtttgtattttttaagggaaaaatagaggagaaagagttaaaggaaaaatattgaaatggtagtatttttgggtgatgagtttatggcgttttgttttttggttgtttataataaatatgtaatttttaaattagtaatagcgttagattatttcggggaaatttggttttgtgtgttacgaagtagggaagggtttgtttttaggcgtagtagtatttgggtatttcgtggtgaagttagttttttatattttttttaggtatagttgtggggagtatgtttcgagaaggcgtaggaagaggtttaggttacgtgtttcgtgtggttagtttggggattagagttaaaattagagttttttttttaggaaatagattatagaagtttgtggttttattttgtgtttttagagaagaggtattaggttggaaagatatttttttgggtagataggtttagagtatagggtttaggtttttagagtaagcgttttagggtttcggcggtcgtaattatcgttgtatgggttttgatgtttagtcgcggaaaagtaagtaatcgggaatgaaggaagtggggttagttttaattttgttacgtgcgggtttcgagacggtggataagtggttggattttattgggtttgggttgttattggtatatagagggtattgggttagaattgcgttttttttattagaggttttatattattttcgggtttttttttagagttttttaattaaaattagtgtttttaaagtttaagttgattttgaagtttagttaggtcgggattagataatgtattttaggggatatttttttgggttttttatttattttggtggttttttgggttgtgtgtagatgtttagttttttttttttgttatcgtgtgggtatggtattatgtttgacggttttttttttttgtttatttttgtcgtagg

SEQ ID NO: 480 - DNA, 10296 bp, Artificial Sequence
  chemically treated genomic DNA (Homo sapiens)
tttgcggtagaggtgggtaggggagggaggtcgttaggtatggtgttatgtttatacgatggtagggaggaggagttgggtatttatatatagtttagggagttattagggtggatgggagatttaggaggatgttttttagaatgtattatttggtttcgatttggttgagttttagaattaatttgaattttgaagatattgattttggttgagaggttttggggaggggttcggagatggtgtggagtttttggtgggaggaacgtagttttagtttagtgttttttgtgtattagtgatagtttaggtttagtggagtttagttatttgtttatcgtttcgagattcgtacgtggtagggttgggattgattttattttttttattttcggttatttgttttttcgcggttgagtattagagtttatgtagcggtagttacgatcgtcggggttttgggacgtttgttttgggaatttgggttttatattttgggtttgtttgtttaaagaaatgtttttttagtttggtgttttttttttgagaatataggatgaaattataggtttttatgatttgttttttgaaggaggagttttggttttaattttggtttttaggttgattatacgggatacgtggtttgggtttttttttgcgttttttcgggatatgttttttatagttgtgtttggaggaggtgtaaggggttgattttattacgggatgtttaagtgttgttgcgtttgggaataagtttttttttgtttcgtggtatatagagttaggttttttcgaagtagtttaacgttgttgttaatttaaaaattatatatttgttatagataattaggaaataaaacgttataaatttattatttaggaatgttattattttagtgttttttttttggtttttttttttttgttttttttttaagaaatgtaaatattaatttttaatagtttaaagttaaaaaataaaaatgtaaataggttgggtgtagggtggtttatgtttgtaattttagtatttttggaggttaaggtgggaggattgattgtttgagtttcggagtttgagattagtttgggtaatatggtaaaattttgtttttataaaaaggatagaaattagttgggtatggtggtattcgtttgtagttttagttttttaggagattgagatgggaggaatgtttgagtttaggagttggaggttgtagtgagttgggattattttattgtattttagtttgggtaatcgagttagattttgttttaaaaaaaaaaaaaaaaaaaaaagtaaatattatatatattttatatttcgggttttttacgtaagaaaggaggagtgtatgatattttatattttaaggaatttagtcgtttttttaatttttgtttggtatggaagaataaaacgttttaatttcgggttatggtggaaattcgtgttgggtatagcggtgttgttgatttttcgttttgagcgtttgtttgttgtgtttagtcgggtttttgtttagttttttagtagatatttttgaatatttattttgtgttgggattttggggatgtacgggttgtagtcgttgggtattttagttttttttttttattatgttcggttaatttttttgtgtgtgtgtttttttgtagagatagggttttgttatgttgtttaggttggttttgaatttttgggtttaagcgatttttttgttttggttttttaaagtgttgggattttaggtgtgagttattatgtttggtttaaatggtttgatttaagcgatgtttttttagtttaaattgtagggattggagaggaaacggatttggaattagtatttatttatatagatggttaattaaagttgggtttgagttataaagtgaacgtgtgtttttatttgggtataaatggttttttagttagatgtaatagaagtgtttagtggggttttattcgttttttggcggtcggttgttgttcgttttaaaaagcgttattttttagtgggatattgtgattgattttagttaattttttttagtatatggtagcgtaggaagtattaagaattcgtcgggagatagagttgaagttttattttttaggtagggagcgttaggtaggcgaagatgacgttgtttagttttgtttaagtgtttgttttgtttatggtattcggttttttaggcggaatacggggaatagggtgagaaatatatgaaataaaaatatagggtggtgtagcgttcgtggcgtggggaggtgggagtcggaggtttcggcgggtttgttttttatcgttgtttttgtgttttcggtttcgttagtttttggggattagggatgttgtttagaaaggtcggtttatattgtgcgtttgaagtttaaatttgtatatttttataatttagtattttttacgtgtttgttttttgttttatagaggagggtttgagtttagttttttggattggggttaggcgtttaggtttgttttttgtaggtaagcggggagggtgtttaaatcggtttttggtttgggagttagggtttattttggggtttttttgatagaataggattgggtattgcgtggataaagtaggaattagtttttttagagatcgggttgtcgacgtttttttttgtttttcgtttttgagtagtacgggtttggggttgttttaggagtaaatttatttagattcgtaggtattgaagtttagggtcgtgttggtggtttgtggttgatggtacgttattttttgagggcgaggttgtttgttgttgggttttcggggttttgggatttttaagtattagtttgtttggttttagtgttttttattttttatgtttgtagatgttttttaacgaaggatttttttttttttttttttaagatagggtttcggttgggtacggtggtttacgtttgtaattatagtattttgggaagtcgaggcgggtggatttcgtgaggttaggtgtttaagattagtttggttaatatggtgaaattttcgtttttaggttatattcgaggatggaagttataggttttcggttttgtgttttagtttttttttttaaattttggtttgatagtaagttattattgtatttagttttgagggtttggagtgatggtttttttgtttgtgtaatatttatagagggtaggaggaaagttttttcgatcgtgataaagtttagaagaaaataaagtagggttgtcgagggggtttgtgttttgtttgttattagtaggacgagaagcggaaatttagttatttggagtttttttatttagtttttttagtatcgttgtttgttttatttatatttattatttttttgtatagttggcgtttttttagttttttgtgtttttgtaaatgttttttttttttttttttttatatttttttagttaacgttaggtttttagagtatttttttggtgtttagttatttttttttttttttttttggaggtttttggttacgaggtatggattagatttttttttgtaggttttttgaattcggtagttagatgatacgagagttttatagaggtagggattgatttgtttttttttatgtttttaggttttatatagagtagcgttatagaaatttatgagttgatgggtagttttagtagattaaagataaagggttgggtagagaattttcggggttattttttttgttttttgtgttgtggtcgttttgtatatatttttggtagggatacgttgtatgttcgatttatatttagtggtttttttttttagttgcggtttttagtatagagtttgtcgtattggtatttgttatagtgattgatcgaacgtgttcgtgtggttgcggtttggggttttaagttttggaggggaagtatatatagggttttttaaattgagggttgggatttatgtatttcgggaaatcggtttagtggattgtaattgaaaaaaaaaaaagggttaagttagtggtttatatttgtaattttagtattttgggaggttcgggagggaggatcgtttgagtttgggagttaatgagatattatttttataaagaattaaaaaacgaattgagcgtggtggtatgtgtttgtggttttagttgttcgtgaggttgaggtaggaggatcgtttgagtttaagagtttgaggttgtagtgagttaagagtgtgttatgggtgagattttatttttggagaaaaaaagagaaatgaatcggaaaagtagagtttttttttatgtaataagggcggttattgtaatttattttagttgtatttgtatatttgagtgtgtatattttattagagtataaaacgtattttttattgtaggttgtgatgaaaaaattggaaagttattaggttgtagcgttttggttttttttcgtgttaggattttttttattttgtagtttttttttttaggtaagttggtttattttttttagaataaaaatacgaacgggggttaacgtttgtgtagcgatgtttatatagatgattttatttattttgtgagggttgaggggcgtttggaggattgtgtgattttgggtaaacggtttaatttttttgggttttagtttttttttaggtgaagttggttgtgttgaggatgtagtgaggttttgtgtatagcgagtgtgagatgaaagcgattattagttttattgaatagatagaggaattaagtgattgacgagtttttcggtaatagtgagggtgttgggagggtttaatttaagttgttgtatagaggtttttagatacgttttgtagtttttagtattatcgtattataatagttaatacgtatttagtacgtatcgtatatcgcgtatcgttttaagtttttcgagtttatttttttattttatttttataagagttcgaagggttgcggattgttttttattttgagatgaagatattgaggtttacgtttaattttttgttttaggttatttagtttttagtggtgaaattaagggtgtggttttatagttcgaatttttgtgttttgggaaagtcggttttatggttagatttgttttatttttattttttagttttattttcgatggttttttttttttgtattttgtttttaaagttattttatcggtcggtttcgaagtttcgtttttttatgtttaggagaattcgttgaggttgtaggattagtattagggtatagagtttggaggcgtttatggtttttgggttttgaaaggaaggtgagagggtagagttagttatgacgtgcgtggaggaagtacgtgttaggggttaggaggaaggggacgtgttttgggaggtagtggggggcgggggggtatgttgtaattttttagttttgttacgtgtggttttttttgtggtaggtggaaaattgttattgaattagtgattttttggggtagaaatagaatttagtggttagtagggttgattaagtagagtagaggtcggcgttattttttttttttataagttagtatttaggtgtagaggataatattatttttttagagcgtgtttttgtttttgcgtttatttttaggaattttttgtttataggtatatagtgaggaataatagttttcgtgtttgattggtattaaaataattacgtagtttattttgtggtttttaggttaggtttttggattaataggaattttttttagtttagtgggatttggtttttttgtagtaggtttttagatttttaggaaatgtgtggttgtagatataggtttatttagttaggttcggttagtttttttttttgtgataggagtttatattttatttattttgtttttgttgtggttattgtgggatttggtatttaggggggttattggaagttataagggttttttttgtttttataggtgtgtaggtttaggtttagaggattttgagggcgatgttttcgttaggtttttgttgaaaaaaggattttggagaaatgttggagggttaggattaatttttttttatttattttgagataagattttgttttgttgtttaggttggaggagagtggcgtgatcgcggtttattgtaattttcgtttttttggttgaagttatttttttgttttagtattttatatagttgggattataggtatgagtcgttatatttagttaatttttgtatttttagtagagatggggttttgttacgttgtttaggttggttacgaatttttgagtttaagcgatttatttattttagttttttaaagtgttgagattataggcgtgagttattgcgtttagttaggattaatttttttggggtttatatttggataagatatagggtttaggattagtgattttttttggaagttgtggtgtttgagaaaagggattagatgataaggaagggggtagggaagtgttgggtagaggagggcgtggtttttggttagggttttatatttaggtttgtgtttagggatttgggtgaggataggtatttttgtttttttgtttaaatgttgtatttttcgagttcgttacgttttcgttttgtgtttataaaaaaattttagtggttttttatagtgggtagagatataagtcgttggacgttaagaggacgtggaaagtatattaataggtattagtaggttattaattgatggaattatgagtttggtaggggcggttagaggagagtttaggttgtttagtagttcgattttaggggaaaattatttttttattttaattgttttttggtttttttatttgttgagggttaattttatttataaaattttgtatttattttttaagtcgtcgtgtgatttgattgttttagtatattaaggtaagaaatttagggatatagaaagttttttgtttttgcgataaggtagggagtttaatagttgattaatataagttatttataaggttaaattgaaagagtattttttaatatatgtttgttggggttttaggagttgtaaatatttatttttagatattgtcgtggggtgggagttttttagtttgtttgtttgtatgtttttttagaggtttgagaagcggggtattgaagaagtgagttatatttttatcgtacgtttttcgaggaggataagggaattttttttattttattgagattgggttttggtggcggaggtaggttagatagggtaaatgggtttgtggtttagttttatattaggttcgtgtattttgtttcgatattgatttgtttttgttagaagttacggtttttaaagtaaatttttgtgatttatttttggttttttttaagttttcgtttcgttttttttgttttttttttaaattttcggtttcgtttttttcgtttttttcgagttttcgattttgtttttttggtttttttcgagttttcggtttcgtttttttttaagtatatggtttagtttttttagttttttgtcgtcgttggttcggtttttttttttggttattacgatttttggaattttcgcgcgcgtttttcgtatttgtatcgtcgttttcgggggcgtggtttttgatcggaagtgaggttaggtattttcggcggcgcgttgtaggcgcggggaatattaatggcggggtgagttgggcgttgttgttgcgcgtgtagatagcgggagtggttgggggttcgttcggtcgtttttttcggttttggtttcggggttgggtgtcgagcgttgggtatcgttttcgtatttagcgagcgcgataggggcgaggttaggatttcgggtcgtagtttttcgggaggagggcgtttttaggtttttaggggtagggtcggcggggtcgtggggaggtcggggtcggcggcggagtttaggtggggggcgtagcgtcggggtttagatttaaggcgtcgggggcgagttcggggcgggatttcgtttttgggtcgggtagttttattgttcgcgttttttgggttgtcgagtgggttttggttttcgggatcggtttgtgttattttttcgggagattttttaagcgaggggaagatagcgatttacggttagtagttagtgttttttggtttgttagtacgttttggtgttgtagaagttagaagttttggttttggagttatgagggtggtaatttttatttatttatttaaattagaaagatggatatagagatcgggtttggtggtttatatttgttattttagtattttggaagtttgaggtaggaggatcgtttgagtttaggagttcgagattagtttaggtaatgtagtgagatgttatttttaaaaaaggtttttaagaattaaaaaaaaaaaaaaaattagtttaggtatggtggtgtatatttgtagttttagttatttaggaggttgaggtgggaggtttatttgagatttagaggttatggtagtaattagttgtgattgtgttattgtaattttagtttggatgatagtaaaataaaaatggtcgggtgaggtggtttacgtttgtaattttagtattttgggaggttaaggtggttgatcgttagaggttaggagttcgagattagttcggttaatatggtgaaattttatttttattgaaaatagaaaaattagtcggaagtggtggtatatatttgtagttttagttatttaggaggttgaggtgggaggtttatttgagttttagaggttgtggttgtagttagttgtgattatgttattgtattttagtttgggtaatagtaaaattttgtttttaaaaaaataaaaagaagaaagaaatgtttgggtgtagtggtttatatttgtaattttagtattttgggaggttaaggcgggtagattagcggaggttaggagtttgagattagtttggttaatatggtggaatttatttatattgaaaatataaatattagtcggatatggtagtaggtgtgtttgtaattttagttatttgggaggttggggtaggagaattgtttgaattcgggagtcggaggttgtagtgagttgttattgtattttagtttgggcgttagagtgagatttcgttttaaaaaaagaaaaagaggatatagaatttttttggtgaggttgttgttagagttaaataaggggaggtgtgtatagtttttatttgtttagttattgtgggttgtgaataaattgttatatttattgtaataattgtttagagaattttggaaattgttttttaacgattgatataggtttagtttaattttatttaagatatgtaggtgagaggattgtttgagtttaggagttcgaatttgcgttgaatcgtgattttattattgtattttagtttgggttatagagcgagattttgtttcgaaaaaaagaagaaaaaaagaaatgtgataggttagattttttgtattagttgttaaagttttggaattaggttattaaggtaaggatttgtttttatgaggtttttttgtagtttgttagagtttaatgaatatttttgttagatgagaaaataatattattttaattaattaattgatgtatttagttattgtttgagatagagtttcgttttgtcgtttaggttggagtgtagtggcgtaatttcggtttattgtaatttttgttttttgggtttaggcgatttttttgttttagtttttcgagtagttgggtttataggtatttgttattacgttaggttaatttttgtattttagtagagacggggttttattatgttggttacggttggttaggttggtttcgaaattttgattttaggggatttatttgttttggtttttaaaagtgttggaattataggtgttttcgaatatttttatattttgaggtattaagggttaggatattaatatattaattttgcggggatatagtttggtttgtgatgtttgttttttatttgtgtagttttattagtttatttttttttttgggttttggtgttttatttttagaaatgaatgagttgattcgagggtttttttagtttatgatttgtcgttttgtgtgatgttaatttgtttgtttttttttttttttattaggtatttgaagttggtgtgtgtttttttttagcgttaagggttttatattgttgggagtcgttgtaagaatcggataggcgttgagtatttgtggttgattcgatattttagggatttatttgtgaaggttgcgaaggtggagagttatcg

SEQ ID NO: 481 - DNA, 11650 bp, Artificial Sequence
  chemically treated genomic DNA (Homo sapiens)
tttttagtagaaacgagatttagttgtgttatttaggttggttttgaatttttagttttaaattatttttttattttggttttttaaagtgttgggattataggattatatgtgagttattgaatttagttaataggtgtatgtaatagtttaaggagatttggtatttaggttttgatttaataaatttttttgtatagacgggggcggggggttttattatgttgtttaggttggtttcgaatttttggttttatataatttttttattttgtttttttaaagtgttgggattattataggtatgagttattgtatttggttttaaatttttttttgagatagagttttgttttgttatttaggttggagtgtagtggtatagtttgggtttacggtaattttttttttttgggtttaagtgatttttatgttttatttttttgagtagttgagattgtaggtttgtgttattatgtttaggtaatttttgtatttttagtagatatggggttttattatgttggttaggttggttttaaagttttgattttaaagtaatttgtttgttttggttttttaaagtgttgggattacgggtatgattattgtgtttagtttgaattttttttgatgatttatattttatgagatataatttaaattttagtatttttagtttttttatttgaggtttaagtttttttaattttttagtttaaatgttagttttgtaatattgtatttatttaatttaaatggaatgtgtagaattttttttatgagtatttattagaagttaagttatagtaaaggtttgaagtttaaaatgtgtataggttgtttttttttttgagagagaaataaaatggtggaggaagtgtgatgaggataagaatgataaggaggatgttttggaggtggagggggaagattttagttagaagggttatgtgattttatttattattaattagtgtttggtgtttaagttggtgttgagttttgagtatttaataaattgatttgatttttatttttttaatatagggttaggtttgggggttggggtaaattgtggaataattaaatatttggagtttttttgtttaaggagggcgtgtttaggaaaagttttttagtagagataaattttgtatgttattagtttagagtttagggattatttttaggtgtggttttattcgggatattgggaattttttttttaggggatatttgttggtatgatgataattggagaggaaatgtgtggagattattagattttatttggtattagggtgatttttttgttgtttgatttatagtattgattttaggtttttttggttttggggtattggttaattggttttagttttaggttgtaagtgtattttgtagttgttttttgttttttgttttgggtagatattttgtttaagttgttaggttttgtttttttttgaaatgggatgattaatgtgtggattttaaaggataagagtgagggtagttgaagaattatagtagtaataatagttaatagtaatatagttttttttttgttgggcgcggtggtttacgtttgtaattttagtattttgggaggtcgaggtgggtggattgtttgagattaggagtttgagattagtttggggaatatggtgaaatttcgatttttattaaaatataaaaaattagttaggcgtggcggagtgtttttgtaattttagttattcgggaggttggggttattgagacggagttttgttttgttgttaaggttggagtgtagtggtacgattttagtttattgtaattttcgtttttaggtttaagtgatttttttgttttagttttttgagtagttggagttataggtgtatgtcgttacgttcggttaatattttatatttttagtagagatggggttttattatgttggttaagttggttttaaatttttgattttaggtgatttattcgttttagttttttaaattgttgggattataggtatgagttattgtgttcggttaatatagtttttattatgtgttaggaattgtttttggtgttttatatatattaatttatttaattttataattatttataaagtatagtgattaagagtatagattttagaattagataggttaggtttgaatttttgttttgttatttattagtattgtgattttggggaagtttgtgttttagtttttttatttgttaaaagaggataattttagtatttattttatagagttgttataaggattaaatgagttataatttataaatagaatgttggttggaaatattagttgggtatggcggcgtgtttttgtaattttagttatttgggaggttgatagtttaaaaattatttaaaattttgataaattttatttttttaggtgagaaaattgaggtatagaagagttaggtaattggttgggtatgatggtttatgtttgtaattttagtattttgggagtttgagtcgggtagattatttgaggttagaagtttaagattagtttggttaatatgatgaaaatttatttttataaaaatataaaaaatagttaggtatgttggcgtatttttgtagttttagttattcgagaggttgaggtgggagaattatttgaattcgggaagtgggggttgtagtgagttaagattatattattgtattttagtttgggtaataaagtaagatttggtttaaaaaaaaaaaaaaagttaagtaatttgtttaagatatcgtaattgaatggtggagttgggatttaaattttaggaagtttggttgtggaggttgtgtttttaatgaagtgggtatgtttatattaattattttataaggggagtgggcgggagaaattttgaattaagtgatgtggaagtttttagtatttaagatgtgagttagttttttttttgtggtaagtgaagtttgtagtagttggtggttggattgtttttaggtggttagtagtttttggaagggggttttgaggtttgaataggggttaaaaggttggggtttgatttggtttttttagcgttttgttttagagtttatttattttttttttagtattgtttttaggaagtttagtgtgatttgatttttggtatttggtaaatgttaatttaatatagaaaatttttgttaaattttaaggaaagatagttttattgtttgtcgtttaggttggagtgtagtggcgggatgataagggtttgagtttttcgaatttttgggtttaagtaatttttttgtttttgttttttaagtagttgggattataggtatttattattatagttaggtaattttttaattttttgtaaagatagggttttattttgatttttaggttggttttaaatttttggattgaattagtttttttatttcggttttttaaattgttaggattattggtatgagttattaaatttgggttaatttttgggagtttaaatttaaggtaaataatttaatgtaataaatttttgtttggggttttttatgttaggttttttattgggttttggagatattggtgtgtattgagaggttatttggattttaggatgtttttagtttaaagggggaaatgtagaagtttataggtagattgtgggtagtggattttaaattaaataggaattagttacgtgggaggggtaggaagtgtttttgttttgggtaatggtttaggtaaaggtaaagaggtcgttttttttggttagggttgggtggtggtttggaagattagataaatgtgattgtggagtaaggaatttattttgagggagaggaggatggttttaaattttggaaagagtttacgtttgtaattttagtattttgggaggataaagcggtaggattttttgagtttaggagtttttagattagtttaggtaatagtaatatagtaagatattttttttttttaaaaaaaaaaaaaaaagcgtagtggtttatttttgtaattttagtattttgggaggtcgaggcgggcggattacgaggttaggagatttatattattttggttaatatggtgaaatttcgtttttattaaaatattaaaaaaaaaaaaaaaaaaaaaaaaaaattgtcgggcgtggtggtgtgcgtttgtagttttagttatttgggaggttgaggcgggggagtcgtttgaattcgggaggtggaggttgtagtgagttaagatcgcgttattgtattttagtttggcgataaagcgagatatcgttttaaaaaaaaaaaaaaaaaaaattagtcgggtgtagtggcgagtgtttggttttagttattcgtgagttgaggtaggaggatcgtttgagtttaggaggtggaggttgtagtgagttatgatcgcgaaattgtattttagtttgggcgatagagtaagattttgtttttaagaaaaatgaataataaaaaataaagtttattaaggagggttttttggaggtaggagaggaagtagggagaggtataggtagggtgaggagtcgttttagggtgcggttttagggatttagtagtggtttggattagcgtgggggatttcgttttggcgttttttttggttggtttttttatgttcgcgtttcgtttttttttttcggttttcgttatgtgggatatttttgggtcgtttcggattgatacgtgagttaggtttcggttatatttcggttcgttttataatttcgaagtagcggtcgtcgtttttgttttgtagtcggttttggagggtttgggtaggtgtcgtttcgtaggtttcgtttcgtttcgttttttggtttcgttttttatttaggtttttttttcggcgttcgcgcgttaggattgggcggcgtcgacgcgtttggcgggagatagaaaagtgttttaattcgcgtcggcggcgattgtagtttttgcgagcgaggagcgcgggatttgttgatacgttgacgttttcgagcgcggttcggggttcggagcggtcggagtagttcgggttttgatttcggttcggttttcgtttcgggttttgtcggcgggcgggcgagcgcggcgcggttcgggtcggggggatgtttcggcggacgcgttggtgagacgagtcgggagggtttgggtttttttttttttttttaatttattttttttttatttagatattttcgattttttttaggtttttattaagttggggtgtgtgtgtgtgttgggggtggggtgttttcgcggaaatgttgcgttttgggttttttgaggtaggggcgcgcgtaaagttggggggtttttgggcgtttttcgcggttttttaggtttgttgggtttcggagttgggacgggcgggttttttgggattcgggttaagtcgtgtatgatgttattttgtttttcgtttaattgcgggatgggggtgggtcggtcggtgttagttggtagggttttcgtcggcgagggaggcgatttttgggagcgagagggagtttttaagttttagttagtgggagatcgagtttgggaggtatttgttgtagtttagttttgggttaatttggtgggtgggttttgttttttaatatttcggggagtatagagttttttaagtttttttttttggattgagaagggtgttgagttgggggtttttttgttttttttatttgggtttcgcgttttagtttggttcggtttgagatttttttttttgtttttacgaggagttttgggtagttggggttgaaggtgcgggggagagagagagtttttggggtaaaggtaggaattgcggtttttattttatttatttttttagagatttaagtggtagagttgagttcggagttaggtttgtggttttagatttttgttttatatttgtgcgtttggggtttgagttttaagttttttagtttgtttgggagataggatagtggggttttgattttttttttgtttggatcgttgtagtttagataattttcgtttttttttttttttttttttttttttttttgagaaggagtttcgttttgatgtttaggttggagtgtagtggcgcgattttggtttattgtaattttcgttttttaggtttaagcgatttttttgttttagtttttcgagtagttgggattttaggtacgtgttattacgtcgggttaattttttgtatgtttagtagagatagggttttattatgttagttaggatggtttcgattttttgattttgtgtttcgttcgattcggttttttaaagtgttgggattataggcgtgagttattttgttcggttaaatttcggtttttttttagacgatagttttatttaaagatgaagttttttatttttttagatttttgtttttttaggttgaggatagggatttgagtatagggattgtgttttttaggttttatttttttaggttaatgtttaggaagagttttttgtttaggcgtttattagattttgttttggttttttttttttttttttttgaggtagggttttcgtttgtagtttaggtcggagtgttgtggtgttgttatagtttattgtagttttaattttttaggtttaagtgatttttttaatttagttcgttgggattgtaggttgagtagttgggattatgggtacgggtcgttataattggttaatttatttaattatttaggagatagagttattttgtgttgtttaggttggagtgtagtggtataatttcggtttattgtagtttttgtttttcgggtttaaggaattttgttttagttttttaagtatttgggattatgggtatacgtcgttacgtttggttaattttttggatttttagtagagatgggttttattgtgttgtttaggtaattcgtttgttttggttttatagagtgttaggattataggcgtgagttatcgcgtttggcgtgttttattttgtgtagagatggaagggggcgggagtggtttcgcgttgtgttttattttattatgttatttaggttggtttcgaatttttggtttttagggatttttttttatttggttttttaaagtgtcgggattataggtgtgagttattttgtttggcgttattttgattttttgtttaggaagagttattttaggagtgattgtttttagattattttaggttttgggttattttttttatgaggggtttagtggaggaattttttttgtgtgaaggatggtagttttatagtttttagtttattttttggttatttgttgtaatttttttttgttttagtgttttatttttcgttttgtttttgatttatttttgttttggagtagagtttagtacgttgaagggtaaaaggtagggtatgttggattataatgtggttgttattattaattggattttgtttttttagttgggattaggatatgaggatttgtaggtgtttggagttaggaaggtttagagtttggttttatgaatttggtaggtggttttatttttttgagttttaattttcgtatttgttaagggggataatgagaatgtgggtgaagttgatggttagtatatatggtaaagtatattattttatagaaatgttttagttgtttgagatgttgattttattaaatagtattggaggttgggtgtggtagtttatgtttgtaattttagtattttgggaggttaagagtttaagattagtttgattaatatggtgaaatttttcgtttttattaaaaatataaaaattagtcgggcgtggtggtaggcgtttgtaagcgcggttattcgggaggttgaggtaggagaatttatttgaatttaggaggtagaggttgttgtgagtcgagattatgttattgtattttagtttgggtgataaagcgagattttattttaaaataaataaataaataaataaatagtattggagtattagggagtgtttatgtagatattattttatttttgaaagaatatttgttgattttttgttagaagttaggtttttgtgttggatgttggagaagtaaagatggtttttgttacgagttgtttgggggtagttgattttaaagttaattttattttgttattagtattttttggatttttgttttttatattgaagtggtggaggatttatgaattgggttaggaatgaattttagatttttttgtattgttgattgtagatatcgtttttttttttttatttttgaaaattttttttttttgaaattgggttttgtttggtttaaaaaatttaattagtattttttattgattaataggtagtagttttgtatatttttttatttatttgtatatttagttagtttttgggtaaatattttttaagtttttttggtgataaattttgggatgttaaggtggagttgatttttgtagatgatgtggaggagataggtagttgtagtgtaagggttcgagataggagggttttttatgtgttatggaagtataggagtgattttaggaagtaacggtgagttttggagaataaggagaaggtaatgtggatagtatagtaagtttttttttatttgttttatttttaaataagatttgttttgtttggaaatttgtaagttttttttagtttataaatgtttgatttagtaatttatttgattaacgtgatttgatgtaggttttgtcgggtggagttggggaaagattattaattttttttaagtatttgatatttttggaggtggattttatgattttttttttttttttttttttttttttttgagacggagtttttttttgttgtttaggttgtagtgtagtggtacgattttgatttattgtaatttttgttttttgggtttaagtaatttttttgttttagtttttcgagtagttaggattataggtatatgttattatgtttagttaatttttgtgggtttttatttatttattttttttgagatggagtttcgtttgtcgtttaggttggagtgtagtggtataatttttgatttttgtttattgtaattttcgttttttgggtttaagtagtttttttgttttattttttcgagtagttgggattataggcgtatgttattatatttagttaatttttttgtatttttagtagagatattattttattatgttgattaggttggtttcgaatttttgattttgtgatttatttatttcggttttttaaagtgttgggattataggtatgagttatcgcgttcggttgatttttattttttttttttttttttttttttgtgagatggagtttcgtttttgttgtttaggttagagtgtaatggtttgattttggtttatcgtaattttcgttttttaggtttaagcgatttttttgttttagttttttgagtagttgggattataggtatgtattattatattcggttaattttgtatttttagtagagacggggtttttttatgttggttaggttagtttcgaattttcgattttaggtgatttgtttgttttggttttaaagtgttgggattataggtgtgagttattatatttggttcgatttttatttttgtaattattaaattggataaatacgaggattttttggagtaatttggaagattgttttgtagagtaaaaatatttagaatttaaagtagttcgtattgtttttttttttttttttatagcggcgttagaagatattgtatattgggtcgggcgcggtggtttacgtttgtaattttagttcgttgggaggttaaggcgggtggattacgaggttaggagtttaagattagtttggttaagatggtgaaattttgtatttgttaaaaatataaaaaaaattagtcgggcgcggtggtaggcgtttgtaattttagttatttaggaggttgaggtaggagaatcgtttgaatttggggggtagaggttatagtgagttgagatgtcgttattttattttagtttgggtgatagagtgaaatttcgttttaaaaaaaaaaaatagatattgtatattgatttttttttttattaattatgtttgtgtgtaggtaaggattgaaaagggatttgtaaaaatggatataagttagatacggtggtgtatatttgtaatttaagttattttggaaggttgaggtaggaggattttttgagtttaggagtttaagattagtttgggtagtatattgagattttgttattataaaaaaaaaaaaaattaatatacgaaaaaataatttggttagttatagtggtttaggttcgtaatattagtattttgggaggttaaggtgggaggattgtttaaggttaggagttttagatgagtttaggtaaaatagtgagatgtttttataaaaaaatataaaatagttaggtatagtgttatatgtaagttgttttaggtatttgggaggttgaggtgggagaattggattgtttgagtttaggagttggaggttgtagtgagttgtgattatgttattatattttagtttgggtaatagagttagattttgtttttaaaagaagaaaaataataaatggatatagagaatatatttagaattttttttttaaataattaatattttttaaaattttgatgtttgttaattttattaattttattttttaaaatatttatgtaggtttgttattgaaaggaaaaagcgatagtttgattttgaatataatatttttggtgaaattttaattttttttttttttttttttttttgagatagttttgttttgttatttaggttggagtgtagtgatatgatttcggtttattgtaatttttatttttcgggtttaagtaatttttttgttttagttttttgagtagttgagattataggtatgcgttatcgtatttagttaatatttgtatttttagtagagatggggttttattgtgtttgattaggttggttttgaatttttgattttaagtaatttatttatttcggttttttaaagtgttgggattataggtttgagttattgtgtttggttttttttttttttttttttatagtttttgaaattattagggtatttttgaaaataaaaaagaagaaagtagtttttaattttattttattaaaaaatttaaaaagaggtgaggtcgggtgtggtggtttatgtttatagttttaatattttgggaggtcgtggtgggaggattgtttgagtttaggagtttaaaattattttgggtaatatggtgagatttcgtttttataaaaaatataaaagttagtcgggcgtggtggtatatttttgtagttatagttatttaggaggttggggcgggacgattatttgagtttaggagtttaaggttgtagtgagttacgattatgttatattgaattttagtttagtgatagagtgagattttgttttaataaaaataagtgaagtagaagtgtttatgttttaaaaagaagaaaaagtaagagttttttttttttagatttttttttagggtgggttggtcgttgtttatacgttttttattatgtaaaatatatggatatattatttttgatttttggtttgttttttttatagt

SEQ ID NO: 482 - DNA, 11650 bp, Artificial Sequence
  chemically treated genomic DNA (Homo sapiens)
gttatggggaaagtaggttaagggttaaggatggtgtgtttatatgttttatataatggagaacgtgtaggtagcggttagtttattttagggaaaggtttgggggagagaggtttttatttttttttttttttaagatataggtatttttgttttatttatttttattgagatagggttttattttgttattgggttggaatttagtgtggtatgatcgtagtttattgtagttttgaatttttggatttaaatgatcgtttcgttttagttttttaagtagttgtgattataggggtatgttattacgttcggttaatttttgtattttttgtagagacggggttttattatattgtttagggtggttttgaatttttgggtttaagtaatttttttattacggttttttaaagtgttgggattataggtatgagttattatattcgattttatttttttttaaattttttaatgaaatagggttaagagttattttttttttttttatttttaggaatgttttagtgattttaaaagttgtaaaaaaaaaaaaaaaagaggttaggtatagtggtttaaatttgtaattttagtattttgggaggtcgaggtgggtggattgtttgaggttaggagtttaagattagtttgattaaatatagtgaaattttatttttattaaaaatataaatattagttgggtgcggtggcgtatgtttgtaattttagttatttaggaggttgaggtagaagaattgtttgaattcgggaggtgaaggttgtaatgagtcgagattatgttattgtattttagtttgggtgataaagtaagattgttttaaaaaaagaaaaggaaaaagaaagttaagattttattaagaatattatgtttaaaattagattatcgttttttttttttagtaataaatttgtatggatattttaaggaataaagttgatgaagttaataggtattaagattttaagagatattagttatttggaaaaaaaattttgaatatattttttatgtttatttgttgtttttttttttttagggatagagtttggttttgttatttagattggaatgtagtggtataattatagtttattgtagtttttaatttttaggtttaagtaatttaatttttttattttagttttttaagtatttggaataatttgtatatgatattatgtttggttattttgtatttttttgtagaaatattttattattttgtttaggtttatttggaatttttggttttaaataatttttttattttggttttttaaagtgttggtattacgggtttgagttattgtgattggttaagttgttttttcgtgtgttgattttttttttttttgtaatgatagggttttagtatgttatttagattggttttgaatttttgggtttaagggatttttttgttttagttttttaaagtaatttggattataggtgtgtattatcgtgtttggtttatgtttatttttgtaaatttttttttaatttttgtttatatataggtataattaatggagagaaaaattagtgtatagtatttattttttttttttgagacggagttttattttgttatttaggttagagtgaagtggcgatattttagtttattgtaatttttgttttttaggtttaggcgatttttttgttttagttttttgagtagttgagattatagacgtttgttatcgcgttcggttaattttttttgtatttttagtagatatagggttttattattttggttaggttggttttgaatttttgatttcgtgatttattcgttttggttttttaacgggttgggattataggcgtgagttatcgcgttcggtttagtgtataatattttttaacgtcgttgtaggggaaaaaaaaaaaatagtacgagttgttttgaattttgggtgtttttattttataaggtaattttttaagttgttttaaaaaattttcgtatttatttagtttaatagttataaaaatggaaatcgggttaggtgtggtggtttatatttgtaattttagtattttggggttaaggtaggtagattatttgaggtcgggagttcgagattagtttgattaatatggagaaatttcgtttttattaaaaatataaaattagtcgggtgtgatggtgtatgtttgtaattttagttatttaggaggttgaggtaggagaatcgtttgaatttgggaggcggaggttgcggtgagttaagattaagttattgtattttagtttgggtaataagagcgaaattttattttataaaaaaaaaaaaaaaaaaaaaaaatggaaattagtcgggcgcggtgatttatatttgtaattttagtattttgggaggtcgaggtgggtggattataaggttaggagttcgagattagtttggttaatatggtgaaatgatgtttttattaaaaatataaaaaaattagttgggtgtggtggtatgcgtttgtaattttagttattcgagaggatgaggtagaaaaattgtttgaatttaggaggcggaggttgtagtgagtagagattagagattgtgttattgtattttagtttgggcgatagacgagattttattttaaaaaaaataaataaataaaaatttataaaaattagttgggtatggtggtatgtatttgtagttttagttattcgggaaattgaggtaggagaattgtttgaatttaggaggtagaggttgtagtgagttaagatcgtgttattgtattgtagtttgggtaatagagggagatttcgttttaaaaaaaaaaaaaaaaagaaaaaaaagaaattataggatttatttttagagatgttaggtgtttgaggaaagttagtaatttttttttaattttattcgataggatttgtattaggttacgttggttaggtaagttgttaggttagatatttgtaaattggaaaaagtttataggtttttaaataaggtaagttttgtttggaaatgaaataaatgaaagaaggtttattgtgttatttatattattttttttttgttttttaaagtttatcgttgttttttagagttatttttatatttttatagtatatgggaaatttttttgtttcgggtttttatattgtaattgtttgttttttttatattatttataaaggttagttttattttggtattttagggtttattattaaaagggtttaagaaatgtttgtttagggattgattgaatatataaataaatgaaaaaatgtgtaaagttgttgtttattagttaataagaaatattaattaaattttttaggttaggtaagatttaattttaaaagaaaaaaatttttagaaataggaaaggagggacggtgtttatagttagtaatatagaaggatttggaatttatttttgatttagtttatgggttttttattattttaatatagaaggtaaaaatttagaagatattaataatagaatgaagttggttttaaaattaattgtttttagatagttcgtgatagaaattatttttgtttttttagtatttagtataaaggtttggtttttaatagaaggttagtaaatatttttttaaggatgaaatgatgtttgtatggatattttttggtgttttaatgttgtttgtttgtttgtttgtttattttgagatagagtttcgttttgttatttaggttgaagtgtagtggtatgatttcgatttatagtaatttttgttttttgggtttaagtgaatttttttgttttagtttttcgaatagtcgcgtttataggcgtttattattacgttcggttaatttttgtatttttggtagagacgaggagttttattatattggttaagttggttttgaatttttggttttttaaagtgttgggattataggtatgagttattatatttagtttttaatgttgtttgatagggttagtattttagatagttggggtatttttgtgagatgatatattttattatatgtgttggttattaattttatttatatttttattattttttttaatagatgcggaaattgaggtttagaggggtgaggttatttgttaagtttatagagttaggttttgaatttttttaattttagatatttgtaagtttttatattttaattttagttgaaaaagtagagtttagttagtggtggtaattatattgtggtttaatatattttattttttgttttttaacgtgttgggttttgttttaggataggggtgagttagagataaagcgggaagtggggtattagggtagaggagagttatagtaagtggttaggaaatgggttgagggttgtggagttgttattttttatataggaggggtttttttattgagttttttatgggagaagtagtttaggatttggggtggtttagaggtagttatttttggaataattttttttgaataaaaaattaggatggcgttaggtaaggtggtttatatttgtaatttcgatattttgggaggttaagtgggggagaatttttggaagttaggagttcgagattagtttgggtaatatagtgaggtgagatataacgcgaggttattttcgtttttttttatttttatataaaataaaatacgttagacgcggtggtttacgtttgtaattttagtattttgtgaggttaaggtaggcggattgtttgagtaatatagtgaaatttatttttattaaaaatttaaaaaattagttaggcgtggcggcgtgtgtttatagttttaggtatttgggaggttgagatagaattttttgaattcgggaggtagaggttgtagtgagtcgagattgtgttattgtattttagtttgggtaatatagagtggttttgttttttaaataattaaataaattagttagttgtggcggttcgtgtttatagttttagttatttagtttgtagttttagcgggttgagttgggaagattatttgaatttgggaggttggggttatagtgagttatgatagtattatagtatttcggtttggattgtagacggagattttgttttaaaaaaaaaaaaaaaaaaaattagggtagggtttgataggcgtttgaatagaaaattttttttggatattggtttgggaaagtggggtttgaggaatatagtttttgtgtttagatttttatttttagtttgaaagggtaaaaatttagagggatggaaggttttatttttagatgaggttatcgtttaaagagggatcgaagtttggtcgggtaaggtggtttacgtttgtaattttagtattttgggaggtcgagtcgggcggaatataaggttaggagatcgagattattttggttaatatggtgaaattttgtttttattaaatatataaaaaattagttcgacgtggtgatacgtgtttgaagttttagttattcgggaagttgaggtaggagaatcgtttgaatttgggaggcggaggttgtagtgagttaagatcgcgttattgtattttagtttgggtattagagcgagatttttttttaaaaaaaaaaaaaaaaaaaaaaaagagggaacgaaggttatttgagttgtagcgatttaggtagggaagaggttaggattttattgttttgttttttaggtaggttgaaaagtttggagtttaggttttaggcgtataggtgtaagatagggatttggagttatagatttggtttcgggtttagttttgttatttaagtttttggggaaataagtaaaatggagatcgtagtttttgtttttgttttagggattttttttttttttcgtatttttaattttagttgtttaaaatttttcgtgggaataggaagagaggttttaaatcgaattaagttggggcgcggaatttaggtgggagagataaaagagtttttaatttagtattttttttagtttaggggagagggtttgggggattttgtgtttttcggaatgttaaggagtaaagtttatttattaagttgatttaaaattaggttgtaataagtgttttttaggttcggttttttattggttgggatttgaagattttttttcgtttttaggggtcgtttttttcgtcggcgaaggttttgttagttgatatcggtcggtttatttttatttcgtaattaggcgggagataaaatgatattatgtacggtttggttcgggttttaagagattcgttcgttttagtttcgaggtttaataggtttggggagtcgcgagggacgtttaagagttttttagttttacgcgcgtttttgttttagagggtttaggacgtagtattttcgcggaaatattttatttttaatatatatatatattttagtttggtgggagtttggggagggtcgggggtatttgggtgggggaggggtgagttaaagggagggggaggggtttaagttttttcggttcgttttattagcgcgttcgtcgagatattttttcggttcggatcgcgtcgcgttcgttcgttcgtcggtagagttcggagcgggagtcgggtcggggttaggattcgggttgtttcggtcgtttcgggtttcgggtcgcgttcgaaggcgttagcgtgttagtaggtttcgcgtttttcgttcgtaggaattgtagtcgtcgtcggcgcgggttgaagtatttttttatttttcgttaagcgcgtcggcgtcgtttagttttggcgcgcgggcgtcgggggaggggtttgagtgaggggcggagttagggggcggggcggggcggggtttgcggggcggtatttgtttagattttttagggtcggttgtaggataggggcggcggtcgttatttcggagttgtggagcgggtcgggatgtgatcgaggtttggtttacgtgttagttcggggcggtttaggagtattttatatagcgaagatcgaggaaggggagcgaggcgcgagtatgggagagttagttagggaaagcgttagggcggaattttttacgttagtttaagttattattgggtttttagagtcgtattttaaagcggttttttattttatttgtgtttttttttgtttttttttttgtttttaagagattttttttaatagattttattttttgttgtttattttttttagaggtagggttttgttttgtcgtttaggttggagtgtagtttcgcgattatagtttattgtaatttttattttttaggtttaagcgatttttttattttaatttacgggtagttaagattaggtattcgttattatattcggttgattttttttttttttttttttgagacggtgtttcgttttgtcgttaggttggagtgtagtggcgcgattttgatttattgtaatttttatttttcgggtttaagcgattttttcgttttagttttttaagtagttggaattataggcgtatattattacgttcggtaatttttttttttttttttttttttttttagtattttagtagagacgaggttttattatgttggttaggatggtataggttttttgatttcgtgattcgttcgtttcggttttttaaagtgttggaattataggagtgagttattgcgtttttttttttttttttaagagaagggggtgttttgttatgttgttgttgtttagattggtttagaaatttttgggtttaagagattttgtcgttttgtttttttaaagtgttgggattgtaggcgtgagttttttttagaatttaaaattattttttttttttttagggtaaattttttattttataattatatttatttgattttttagattattatttagttttggttaaaagaaacggtttttttgtttttgtttgagttattatttagggtaggaatattttttgttttttttacgtggttgatttttatttaatttggggtttattgtttataatttgtttgtagatttttgtatttttttttttgaattgggagtattttgaggtttaggtggttttttaatgtatattagtatttttagggtttagtagaagatttgatataagaagttttaggtaaaggtttgttgtattgaattgtttattttgggtttaaatttttagagattagtttagatttagtggtttatgttagtaattttagtagtttgggaggtcgaggtgggagaattgatttagtttaaaagtttgagattagtttggggattagagtgagattttgtttttataaaaaattaagaaattatttggttgtggtggtgaatgtttgtaattttagttatttgggaagtagaggtaggaggattgtttgagtttaggagttcgaggggtttaagtttttgttatttcgttattgtattttagtttgggcgatagatagtgagattgtttttttttgagatttagtaaaggttttttatattagattgatatttattaagtattaaggattaagttatattggattttttgggagtagtgttgagaggaagataaatgagttttgagataggacgttgaagaaattaaattaaattttagttttttagtttttgtttaggttttagagtttttttttagaagttgttggttatttggggatagtttagttattagttgttgtaaattttatttattatagaaggaagattaatttatattttaagtgttagaagtttttatattatttaatttagggtttttttcgtttattttttttataaagtaattaatgtggatatgtttattttattgaaagtatagtttttatagttaaattttttggggtttgagttttagttttattatttagttgcggtattttaggtaaattatttaattttttttttttttttagattaagttttgttttattgtttagattggagtgtagtggtgtgattttggtttattgtaatttttatttttcggatttaaatgatttttttattttagtttttcgagtagttaggattataggaatgcgttagtatgtttggttattttttgtatttttgtagagatgggtttttattatgttggttaggttggttttgaatttttgattttaggtgatttattcgatttagatttttaaagtgttgggattataggtatgagttattatgtttagttaattatttaatttttttgtgttttagtttttttatttggaaaaatgggatttattaaaattttagatagtttttaaattattagttttttaagtaattggggttataggagtacgtcgttatgtttagttaatatttttagttagtattttgtttataaattgtaatttatttaatttttgtaataattttatgaggtagatattgggattatttttttttagtagatgggaaaattgaggtatagatttttttaaggttatagtgttagtaaatggtagagtagggatttaaatttggtttgtttagttttagagtttatgtttttaattattatattttgtaggtaattataggattaaataaattaatatgtgtaaagtattaaaaatagtttttggtatataatgagagttatattggtcgggtatagtggtttatgtttgtaattttagtagtttgggaagttgaggcgagtgagttatttaaggttaggagtttgagattagtttggttaatatggtgaaattttatttttattaaaaatataaaatattagtcgggcgtggcggtatgtatttgtaattttagttatttaggaggttgaggtaggagaattatttgaatttggaggcggaggttgtagtgagttgagatcgtgttattgtattttagttttggtaatagagtaagatttcgttttaataattttagtttttcgagtagttggggttatagaagtatttcgttacgtttggttaattttttgtattttaatagagatcggggttttattatgttttttaggttggttttaaatttttgattttaggtaatttatttatttcggttttttaaagtgttaggattataggcgtgagttatcgcgtttagtaaaaaaagaattatattattgttagttattattattattgtaattttttagttgtttttatttttattttttgaggtttatatattagttattttattttagggagaggtaggatttgatagtttgggtaaggtatttgtttaaagtaagaggtagggaatagttgtagagtgtatttgtaatttggaattggggttagttaattaatgttttagagttaaagaagtttggagttagtgttgtgagttaggtagtagggagattattttagtgttagatggaatttgatgatttttatatattttttttttagttattattatattaatagatattttttggagagaggatttttagtgtttcgagtgaaattatatttgggagtggtttttggattttggattagtaatatatagaatttatttttgttgggaaattttttttgaatacgttttttttggatagggaggttttaggtatttggttattttataatttgttttaatttttaggtttgattttgtgttgggaagataagggttaaattaatttattaaatgtttagggtttagtattagtttggatattaaatattaattgatgataagtagaattatatggtttttttggttggagttttttttttttatttttagagtattttttttattatttttgtttttattatattttttttattattttattttttttttaagagaaaggatagtttgtgtatattttaagttttagatttttattatagtttggtttttggtaggtatttatggaaggggttttatatattttatttaaattgagtggatgtaatgttataaagttaatatttgggttggagagttagaaaggtttggattttaagtgagaaagttgggaatgttagagtttgaattgtattttataaaatatgggttattaaaagagatttaggttgggtatagtggttatgttcgtaattttagtattttagaaggttaaggtaggtaaattattttgaggttaggattttgagattagtttggttaatatggtgaaattttatatttattaaaaatataaaaattatttgggtatggtggtataaatttgtagttttagttatttaggaggatgaggtatgagaattatttgaatttaggaggaggaggttgtcgtgagtttaaattgtgttattgtattttagtttgggtgatagagtaagattttgttttaaaaagagatttgggattaggtgtagtgatttatatttgtaataattttagtattttgggagggtaaggtggaaggattgtgtaaagttaggagttcgagattagtttgggtaatatagtgagatttttcgttttcgtttgtataaaaaaatttgttaaattaaaatttaaatattaagtttttttaaattattatatatatttgttggttgggtttagtggtttatatgtaattttgtaattttaatattttgggaggttaaggtgaaaggatagtttgaggttaggagtttaggattagtttggataatatagttagatttcgtttttattaaaaa

SEQ ID NO: 483 - DNA, 5447 bp, Artificial Sequence
  chemically treated genomic DNA (Homo sapiens)
tttcgaagtttttatggagtttaagatttttaggagttaagtttgtttcgtttttgcggattagttttttaatgggcgatttaagtttatcgtaggcggtggggatgaggacgttgggtgggaggaggggaggggaggttgaaaaagattattttttttgttttaaggttttttttaagattttggatttttgttttaagagatttaggttttttttgttgtagtgggagcgtaaatattagggtaggagattttagagaaggagcgtataatttaacgtttgtttttttgaagttttatttttgataaaaattatagaaaagttaggtaggatttaaagatatcgtaatgattagtttaaagttaaatagataggatatttagtgcgggtgtttggataggtattttttttgtcggagagtttagatattttagttcgggtgttgttttgggaagggatttcgaggttagcgtggtacgggtagagaatggtgttagggaggtaaaatgtttgcgggggtagttttttttaggtagttttcggtttaaaatttaagaaaggattattcggtttatgtggggaattgggttgttgttaggagggttttgtgatgttatcggagattgattttaggttgagaggttgtcgtttgagttaggtggggtttggaattttttttgtggtttcgtataagtttagagttgtttatttttaggagttaaaaatttggttagttaagggtaggtatttggttggttggtattagtttaggagattaggattgggatattgtatatttatatttttttttttttttttttttttttttttttatatatatatatatatatatatatatatatatatagagatatatttgaagaagattttttagatatgttttaattgttaggagtttgcgaggtgtttaagtgtttgatttttaagaatcggtttttagagatttttattttttaaagatttttttattttatattggtttgggttttttttaggaaatcgttttttttttgggttttttgttttagtttgggggaagtagaatattgtttaggaagtagggaagggtgaggaagggtgtgaggtttattttttttatgggaggattttattagtttgatgtatatttatatatttttttttgaggtagtttttttagaggttagtagttcgttttgtttttggagaagttttatttttatttaattataaaaagatttaataaagaaatatatttttttttattgttatttggggtttgaaggtattatattttttttttttttttgttattttgaggttagttggtaatagtttttttttaagttttagtttaggcgagcgatgagagttatattttaatggaatttaatgagagtattatttgagttgattatgtaacgtttttttgtaaatattgaaaaaagtttggagaagagatgggatgagtttagttgtttggttttaggggattttagagatatagtttgtagttatagattggtaaatgtgaaatttggatgtttattggtaataagagaatttttaagtttaggtgtattgtttaaagtgttatagatttatatttggtttataatgtatatttgtttgttgtttgggttaaggaggaaagaagaaagaaggatgaagaggttaagtataaatgttatttatttttttttaagttatgataggagatatatattaattgggtatttaattgaatttaagagtaatgtatttaaaatttttttaattttttttaaaatttgatatattgtaataaattgttattggggatgggaagatggaagtttggtgtttatgggttaggtatttgtgtaggtgtagattttataatgttaaatatggaaatattttagattagaggtaggtttttttatttgttaaggtgtatttatatgatagtaaggtttaagtaaatatttagtttttattggtatttgttttatttttaaattttagaaaaaaggtgtgtgtgtgggttggggggacgggggggggagggaggtggtagggggtgtttttgttgtgttttatttgtagttatgtattttttgtattattatgatggagattatttagttatgttaggaattagattatgatgttagaaaatattttttttaaaataggtaaaaagttagggttttgggtatatattgaggagaatttttacggaaagtaataaatagggtagtttggaagaggtatttgttttttaataattgtttttagtgggaatagaagtttttttttaagaagtttttaatttattttaagatttaattttatgttttttgaagaataataaaaaatatttttggaaaagattgttgagaagattttttttttttagttagaagagtagagagaagattgtaaattaaggaaaaggtgaagtaataaattaggagggaattttggtatttcgagtatataaagattatttattttttttgtgtttatattttttttttttgtggaggagaggaaattttaaaaatatttgatagatgttttgttattaatattagaaaagtgtgtggggaaaaagaaaggagggaaggagtggggggttaattttgtttaattagtagaaaaagtaatataaattaaagtagtttattgatgttagtttttaatttataatgttttgaaagtaaagtgaatttatttataatataagtgatttgataattttaatttgatttttgttttaattttttattgggagaagggttgattttttaaagtttggatagtttgaaatttggttaggtattttggattttttattgtggaagtaaatattattattttaatgttaaataatttgtaagtattaaatggtttatttgtgattgattttttttttttttttttttttttttttatagatttttttttttagatttaacgattatattagggtttttgtatttttttggaaggattttttttataaattagaaagtgttcgaggtttaaaggttgatatttttgagtgttgatattttgtttttttatattatttaaataagtttaatatttagaaatttttatatatttaagggaagttgtggaaatttttagagagagagtgtgtgtgtgtgcgtgtgtgtgttttggttttgttttgttttttttttttgttagtgagaagaagtcgagttttttaaggtacggggtttatagtaatgaattgaggaaggtaggagtttttaagaaaatatgtttttttatttaatttaagtagtaaattttaattgttagttagttgtagtgaattagtgggagtttcgatgagcgagggtttcggtgatagcgtgttattttttttattttgggtaaaatatgtggagtattattcggaaagtcgggtttgataaaggttatattttttgaattattttaagaatttaaattatattagttttttagaaattaatgaattttattagtaggattgtttagaagataaatattttttgaatggtttttagtttattcgcgttttttttaaaaagttagaggagttttggggagggtatttattttcgttgtaatttttttttagatgatattatttagtaatttcgagtagtttttttttttcgtttattagttttggaaagaatttcggttttttcgtcgttttttttaggtagagtagtatataattatagttttattgtatttgttcgttggttgtagcgattcggatatagttttttaagaatttgtaatttgggatttttgagggggaggggataagtaggtagggtattagagaaaggatgggttagattttcgattatgagtgaaaagggtcgtgtgcgtgttttaggagtgtcggtttttttttgtaatttaaaagggggattttttttgtgcgcgggttttttgggatcggttttagatgttttttagtagttttgaaatagtaaaaagtgtaatttagatatgaaatttggaattgtttttgtttttttaagtaaaagatttttttttttttagtcgatgttttttatttagtttatttcgggaatgggttagggaggaaggtttttatgtatcgtttcgagttgttaggcgagtttcgggttttttaaatttataggttaatagttcgcgtttttttcgcgtaggttttcggttgttcgcggttttcggtttagttttttggtttttttttcgtcggttcgtttttggtggttttggcgttcgttcgtttagttcggcgcgtcggggatcgtcggttgttcggggtagttcgtacgttttcggggatttcggttttcggattcgtcgcgtcggtaggagtcggtcgggtttggagggagtaagcggatgcgtttacgttttcggtacggggatggcgcgatagggttcgggtttcggggtggggttcggtagagtttttgatagtttcggggtcggtagcgcgggaggggggagtttcgtcgttcgtcgtttattttcggttcggggtttttttttattcgttcgggcggcgcggggttcgttcgggtcgttcgtcgtcgttttcgtttttcgcgcgttcgttcgttagttcgtttgcgttttcgttcgtttcgcgcgcgtttttagggcgttatttttttgcgattagtttattttttcggtaggtttgtttcggagcgtgtgaatattttttcgttcggtttttaattcgtttttaatttgcgtcgttcggttagtatgttttttcgttcgtgaagcggggttgtcgtttttttgtcgtttcggttgttattaacgattcgttttcgtcgttatttggtttttttgatcgacgatatacgtatttgaaatttgtttttagggtgtgtggaattaatttttcggaagtaattagtttattagaggaggtagatagatagttatgtatatatatgtgggtttcgttataagtggttttggaacgaaagggtttggttcgtaaagaagttgattttagagggggaaattttttttttttaggaggcggttagttttgttttacgaatttaggagaattgttggttagattaattagatattgttatgggagacgtgtaaatatattatttattattgatgtatatataaaattattttattttcgttattattttagaggaagcgtttttgatttgttttttttttttttttttgttttttttggttgtgtggtttggagaaagtatagttggagtagtcggttgttaaataagtaagtgttgagaggttttagagaaattttttttttttttaatttgggagatgtttttgatgttgaagaggttttttgagagcgggttaaaaagggggagcggagtagtgcggggagatggagagtttagattgatattcgggttttatttttttttgttgtagg

SEQ ID NO: 484 - DNA, 5447 bp, Artificial Sequence
  chemically treated genomic DNA (Homo sapiens)
tttgtaatagaagggaatgggattcgagtgttagtttggattttttattttttcgtattatttcgttttttttttttagttcgtttttaaaaagtttttttaatattaagggtattttttaagttgaaaagaaaaaaaatttttttggagttttttagtatttatttatttagtaatcggttattttaattgtgttttttttaaattatatagttagaaagagtaaaaagggaaaaaagaaataaattagaggcgttttttttgaaataatagcgaaaataaaatggttttatatatgtattaatgataagtagtgtgtttatacgttttttatagtaatgtttaattaatttggttagtagtttttttgggttcgtggaatagggttaatcgttttttaaaagaagaaagtttttttttttgaagttagtttttttgcgaattaggttttttcgttttagagttatttgtagcgaaatttatatatatatatatagttgtttgtttattttttttggtgggttggttgttttcggaaagttgattttatatattttgagaataagttttaagtgcgtgtgtcgtcgattaggagggttaggtggcggcgagggcgggtcgttagtggtagtcggagcggtagggaggcggtagtttcgttttacgggcggggagatatgttggtcgggcggcgtaggttggaggcgagttgaaaatcgagcggaggaatgtttatacgtttcgaggtaaatttgtcggagaagtgagttagtcgtaaagaggtggcgttttaggaacgcgcgcggggcgagcgagggcgtaggcgggttggcgggcgggcgcgcggggggcgggggcggcgacgggcggttcgaacgggtttcgcgtcgttcgagcgagtggaggggagtttcgagtcgggaatgagcggcgagcggcggagtttttttttttcgcgttgtcgatttcggagttgttaggagttttgtcgagttttatttcggagttcgggttttgtcgcgttattttcgtgtcgggggcgtgggcgtattcgtttgttttttttaggttcggtcggtttttgtcggcgcggcggattcgggagtcgagattttcgagggcgtgcggattgtttcgggtagtcggcggttttcggcgcgtcgagttggacgagcgggcgttaagattattaggggcggatcgacgaggaggaggttaaggagttgggtcggggatcgcgggtaatcgggagtttgcgcggagaggacgcgggttgttggtttgtgaatttaaggagttcgaagttcgtttggtagttcggggcgatgtatgagaatttttttttttggtttattttcgggatgaattgagtggggagtatcggttagagagagggagattttttgtttagaagaataaaaatagttttagattttatatttaaattgtattttttgttgttttagaattgttgggagatatttggagtcggttttaaaaaattcgcgtataggagagattttttttttgaattgtagagggggatcgatatttttggagtacgtatacggttttttttatttatggtcgggagtttaatttattttttttttgatattttatttgtttgtttttttttttttaaaagttttaggttatagatttttggaagattgtattcgagtcgttgtagttagcggatagatgtagtggaattatggttatgtgttgttttgtttgggagaagcgacgggaaagtcgaggttttttttaaagttaatgggcggggaagaaagattgttcggaattattgggtagtattatttaggaaaggattgtagcgggagtggatattttttttagggtttttttaattttttgaaaagagcgcgagtggattgggaattatttaagggatatttgttttttaggtaattttgttggtagggtttattagtttttagaaggttagtgtgatttagatttttgagatgatttaaggaatgtggtttttattaagttcgatttttcgggtgatgttttatatattttatttagggtgggagaaatagtacgttgttatcgagattttcgtttatcggggtttttattggtttattgtagttagttagtagttaaagtttattgtttaggttgggtgggggggtatatttttttagaagtttttgttttttttagtttattattgtaaatttcgtattttaaaagattcggtttttttttattaataaagaaaaaaagtaaaataaaattaaaatatatatacgtatatatatatattttttttttgggaatttttataattttttttgaatgtgtaaggatttttaaatgttagatttgtttggatagtatgaaaggataaagtattagtatttagaaatgttaatttttgaatttcgaatattttttgatttataaaaagaatttttttaaaaagatgtaggagttttaatgtaatcgttagatttgaagggggaaatttgtaaaaaaaaaaaaaaaaaaaaaaaaaaagttaattataaatgagttatttaatatttgtaagttgtttaatattgaaatgataatatttgtttttataataaaaagtttaaggtatttagttaagttttaaattatttaggttttaaaaagttaattttttttttaatagaaggttaaaataaaaattagattgaaattattaaattatttatgttgtaaataaatttattttatttttagaatattataaattaaggattggtattaatagattgttttgatttatgttgttttttttattaattaaataaaattaattttttatttttttttttttttttttttttttatatatttttttggtgttaatggtaaaatatttattaaatatttttagaatttttttttttttataaaaagagaaaatatagatataggaaaaataaatagtttttatatattcggaatattaaagtttttttttaatttattattttattttttttttgatttataattttttttttgtttttttggttgaaagagggaaatttttttagtagttttttttagaaatattttttgttgttttttagaaaatataaaattaaattttaaaatgaattaaaagttttttgaaaggagatttttgtttttattaaaggtaattattagaaagtaggtattttttttaagttgttttgtttattatttttcgtagaaattttttttaatatatatttaggattttgattttttgtttgttttggaaaggatattttttgatattataatttagtttttaatataattgagtaatttttattataataatgtagaggatgtatgattgtaaatgagatatagtaagagtattttttattatttttttttttttttcgtttttttagtttatatatatattttttttttaaggtttagaaatagaataagtgttaatagaagttaaatgtttgtttaggttttgttgttatgtaaatgtattttagtaaatgggaaggtttgtttttaatttgaagtatttttatgtttagtattataagatttatatttatataaatgtttagtttatgagtattaggtttttatttttttatttttagtggtagtttattatagtatattaaattttaaaagaggttgaaaaaattttaaatgtattatttttaaatttagttgaatatttagttaatgtatattttttgttatagtttagaaaaaagtaaatagtatttatgtttagtttttttatttttttttttttttttttttttaatttaaatagtaaatagatatatattataaattaaatatgaatttatagtattttaaatagtgtatttgggtttgggaatttttttattattaataagtatttagattttatatttattaatttgtagttgtaagttatgtttttaaaattttttggaattaaataattaaatttattttattttttttttaaattttttttaatgtttataaagagacgttgtataattagtttaagtaatgtttttattggattttattagaatgtggtttttatcgttcgtttggattgagatttgagaggaggttgttgttagttgattttaaggtagtaaaaaagaaaaaaagatgtaatgtttttaaattttaagtaataataggaaagggtgtgtttttttattaaatttttttgtagttaggtgaggataagatttttttaggaatagggcgggttgttaatttttggaggaattgttttagggaggagtgtatagatatgtattaagttgatgggatttttttatgggaaaagtgggttttatatttttttttatttttttttattttttgggtaatgttttgttttttttaaattgaagtaggaggtttagagaggaggcggttttttgggaggaatttaaattaatgtgagatgagaaggtttttaggaaatgggggtttttgagaatcggtttttaaaggttaagtatttgagtatttcgtaaatttttgataattgaaatatatttgaagagttttttttagatatgtttttgtgtgtgtgtgtgtgtgtgtgtgtgtgtgtgtgtgagagagagagagagagagagagagagagaatatgaatgtgtagtgttttagttttgattttttggattggtgttagttagttagatgtttgtttttggttggttaagtttttggtttttgaaagtaggtagttttggatttgtacgaggttatagagagagttttaagttttatttggtttaggcgataattttttaatttgaagttaattttcggtggtattatagggtttttttggtagtagtttagttttttatatgaatcgaatggtttttttttaaattttgagtcgggggttgtttaaaaggggttgttttcgtaagtattttatttttttaatattattttttgttcgtgttacgttggtttcgaagtttttttttagggtagtattcggattgagatgtttaaatttttcggtaggaaggatatttatttagatattcgtattggatgttttgtttgtttggttttgagttggttattacggtgtttttggattttgtttaatttttttgtaatttttattagaaataaggttttaggagagtaaacgttgagttatgcgttttttttttggagttttttgttttggtgtttgcgtttttattgtagtaagggaggtttgagttttttagggtaggggtttagggttttgggagaggttttagggtaagggggatgattttttttagtttttttttttttttttttatttagcgtttttatttttatcgtttgcgatagatttgggtcgtttattaggaagttgattcgtagggacggggtaggtttggtttttggggattttaggttttatgggaatttcgggg

SEQ ID NO: 485 - DNA, 7900 bp, Artificial Sequence
  chemically treated genomic DNA (Homo sapiens)
gaatttttttattagagttttattttttatatataagttttttttgatatttagttaaattttaagtttattatttcgtgtgattttttttttttttatagatggtattggagttaagagagattataaataggttttgaagtattttaatttagttttttagggaggttatattttggttttttataatttagtttagatgtatgttagtggtatcggcgtgatgcgattatgttatattgtagtggaggtaaggttttttttattagtttgtgtgtagggagttgatttgtttagtaggaaagtttgcgtttttaattttggtttttttgtatgtttttttttgtagttttagatttagtttatttagttttgatatattgagggaagatcgaggggtttgtgtgtaattattatatttatttatttagtgtttttttattataattaattgtataaggggagatattggtgtttgtagtatttttagtatttaagatagtatttgataataattagtattaaaaaaatatataagttgagtataatggtacgtgtttatagttttagttatttaggaggttgaggtggatgaaggtttgagtttaggagtttgagattaatttggataatatagaaagaatttattttttaaaaaaaaaaaaaaaagaaagaaagaaaaagaagttgaatgaatgttttaaaaaggaatgttaatattttttaattggaaattgttttttagtttttttttagatttggtattttagagtgatattgataaatgtttagtaaagtttttaaatttttgtgttttagtttatttatttgttaaatggggtttttaataggatttattttttagggtggttttttatgaattttatgggaagattaagaatggtaatatatataaattattataatagtgttcgggtagagtaaatggttatttttgtagtataataattgtgtattgttttttttttttataaatttgttgatttttaaagagtaagtgaaaattttaaataagtattttaaatttttatgtttgtttaagaaagttgttagaaattgaaggagtaagtttaatagttatgtgtaattaaagtgtataagtgattttttggtatattttttttatttttttttattgatattttttttttttattttatatagttgtttaagaatgtatgtgaacgaggtcgttggtttgaaaggtttatgattgtttataatagttataaagatggcgattataatgttgtagtgatttagtatttttttttggttgaatagggttatgaagtggtataaagtaatgtagtttttatttttgattagagtaaggtttattttagttttgttttaggtttagaatgtacgagtttatattagtaaattgtttaatgtatttaaaaagaaaagttattaggaaatattttttattattgtaattggaattgaatatataggtttaagttattaatattttattttagttattaaagttagttttataacgagttgattgtagaaatggatttgatatttattttaaaattaagtattttgtataaatgtattttttaaaatatagtggatataaaaatgttatttttttaatattgtagaagagtgatttagtagttttatgattggttttatagatataatatgttttataaagtagtgtttttttgtatttagtgattgttttgaatttattattttagtttagtaattaattttagtatttgttttaatttttatattttaatttttgtttaatttatgttttatttattttttttattttgtaaatgaaaattaagtttagtgtttttttttaaatgtttgatttgtattttatttttttttttgtaggagaagtaagtattgtaggtgagaatgaaatttattttagagttttgttatattggaatagggtcgttttttaaggtaagtgattaattttaagataagagttttatttagggatttttttatgttgtttattttttatgaatattaaattatgaagtcgagtattgtggtttacgtttgtaattttagtattttcggaagttaaggtaggaggattatttgaggttaggagttcgaaatcgaaattagtttggttagtatagtaaaattttgtttttattaaaaaaaaaaaaaataaaaaaaattagttgggtatggtggtaggtttttgtaattttagttatttaggaggttgaggtaggagaatcgtttgaatttgggaggtagaggttatagtgagttaagattatgttattgtattttagtttgggcgatagagcgagatttttttttaaaataataaaataattaattaagtagagatattgtgatttaatttgtttgtatattattggtatttatttttaatagaagtttttagagttagagtttttaaattgggttgtaaagtttttgtattatatatttttattaagttatgatttattttttgttttttagtttgaggttagtatattgtgtgaaatgggaattaaatagaatgtatgatagaatattagtttgaaatttaagagattttttttttttttttgaatatttattttttatatatgttttttttaatattttttgtttgtttttttttttaaatttaaatggttaagttggattattttaaaatgtaaatgatattataaagtagagtttgattatttatataggagtgtttgtgaaagaagggagtataggttgagtattttttatttgaaatgtttaggattagagtgttttagattttagatgtttttgttttttttgtttgtgtttggtatatttgtatatacgtattgtttgagtatttttaatttgaaatttgaaatgtttttgtgagcgttttttttgagtatgatttttgaatgttattttaggttttggagtattttagattttagttttttgaattagggatattaaatttgtttttttatatatatattaatttggttttatttttttgtattttaaagttttttgtagaagagttatatttttagtttaaatttttattggattttataatttggttgaaaggatttgttataaagtttgtgtattatgaattaaaattttttgttttatgtaagtatgttaatgggaggagaaaaaagtttgatttgttttaaatatattttatttattggtagttttgtatttaatttttgtttaaggttatattgtggttagaattaagttcggagattattatttttatgggtttggtatcgatgtagattatgaaattgtatttatttattatcgtttggtttttgagtagtaatatagtgtataagttatgtttaatttgggatatatgtatgagaaaggattgggtattaaataggtgagtgtggtttttaaatacgtttgaattatataattgtgattggggaaaatatttgtatttgtatagaaaatagattttttttgatatttagttggattttaggttattaaattatgggattgatttgtaatattttagaagattgtttttttattttttattttttagtacgtatagatattgttatttacgttgttttatttagggattaagttgaagatagatttatgaaaatggaagtgtagtgttttttttgttgataattatttgtttgagaaattatttgtttatcgttagttaaattttattttttttaaattattttgaaatgaattaaatgtattttattgataaatttatttttgatttttatatttgtttaatgaagtttgttattttttggatttatgatttaaggttttttttgtgtgtttttaaaagaatttggaaaaattatagatttttttgtatatttttaagttggtatttaaatttttttttaagttttaaagggtttaagttttagttattttaagtattaatatttttaaataaaattaattatttttaaaatatttaatagaatttaaataataataatttaatatttatttattattattaattttttagaaatatataagtaagttttttaattgaaagttaggtttttttttgtttttttaaatttatgttttttattacgatttttgtagaatgtaatattaatgtattgtttttaatgtttaggttttttattgattattgtattatatttatttgaaataaataagtgtataaatttattttgaattttattattagtgatttaagtgttaagaaaaatttatgagatattattagttatagttggttagttaatgtattgttgattaaatttataaaatatattttgataaaattttgttttttgtattattaattgaaaatgtattttttaatgagataaatggagtatttgttaaaaattgagattttatattaattttgttttttatttttttaaatgtatgattagaatgttatgtatgtgaaaatgggaagaattttattatagtatggttatttaattttttaaattattttaagagttagatgttaaaaattagagtgatttgttattagaaattatttttaatgattaattttttgattatttgataggtttttttttagttgtgttgaaagtaaagaattggaaattagagatttgtgaaagtatgtattttttgatattgggattttttattttttttattttttaggaagagtataaaaggttttattaagatttatgaaataggttgttaattatatttttttttgtgttatttagaggttttttgttgatttaaggattgagggaaagttgtttatttttgttaatgcggtatttttttgataaaatgttgttgttttgtttatatttggatatttttttttaattttagtatgtaaatatttatattttaaatttattttaatatttagaatattattaatattagatatttaaatatagtttagttaaggtttaggagtagtaaatttagtatatttaatttttggaagatttttgttatttaatgtagtaattgaagtttttttttattgttaaattagttatttagtgttttaaattagatttagtttttattagaaaggttgacggatttttgtcgttttttttaaatggagatggggtattattatgttgtttaggtttgttttaaatttttggggatttaagcgttttggtttttaaaagtgttgggattgtaggtatgagtttttgtatttagttgattttatttttaatttaagtgaagtttaatatgattaatataaagattatatgtaagttatggtttttatggagtatatttagtaataatttattgattgtagttaaaattaaaatgatataattaatttgtttttataatagtttataaaataagaaaatgtgttttaatttaatttgtaatatattgtatagttaataatagaaatttttgtgaataaagaatatgataaaaggtatagtatttttttgataagagtagggggagggaatttttgtttagtttttgagaataaataattatttatgaaaataaataattatgtatgaaaattagtaattttattattttttttttttttcggtgagatggagttttattttgttgtttaggttggagtgtagtggtataattttggttttttgtaattttcgttttttgggtttaagcgatttttttgttttagtttttcgagtagttgggattataggcgtttgttattacgttcggttaatttttgtatttttagtagagacggggttttattattttggttaggttggttttgaatttttgattttatgagttatttgtttcggttttttaaagtgttgggattataggcgtgagttattgtacgcggttttattattttttttataagatatcgtgattattttttttatttttttttttttgaggtttaaaatatttatgttattaaaaataattttttatttaatatagttaggaaaatattaaatatgaggattgattataattggaaaaaattattatattatttgataagttttaattatatattagtgaatttatttaattattttagtgaattatttaatgtatgaattatatgaagtttgatttatgattttgaaaaatatagtagtcgaaaaaattatttgagttatatttttttaaaaatttagatattaattatattgttagtattatttgaagatgtttttttttttaaataatgatatattttaaggataagaataaggaatagttgaaaataattgtttgtatttaaatatgtttggagggggagttatttttggtttttaattttttttttttatattttatggaatttttttttaagagtttggtattttttgataatagggagtagaagtgagatttttaagtgaaaatttttattattttattttattatatatttgaatttagaatattttagtttgggttaaaattaagaatgtttggttttattttttatagaaatatatttaatatagggaaatataagatgttttaataagggtttataattagttaataaaggagttttttttagaattagtattttaaggtatttttttcggtggtagtttttgaggtttttatattttagggtaatgtatttgaggaaagagtggggtagatttttttcggtggtagtttttgaggtttttatattttaagataatgtattggaggaaagagtggggtagataagggttgtgtttttttttagtaaagcgaagtagagaaacgttgttgtgtatataggtttatttttagtagattttttttaggaaaaagtatatatggaagttgtagaattgtagaatcgagttttttaatatgtttatgtaagtattttttgtaaaatttgtttttttttttggaaatagggttttattttgttatttaggttagagtttagtggtattattttagtttattgtaatttttgttttttgggtttaagtagtttttttatttagttttttaagtagttgggattataggtaggcgttattatatttagttaatttggtttattttttgtagagatagtttatgttgtttaggttggttttgaatttttggttttaagtgatttttttgtttcgtttttttaaagtgttgggattataagaatgagtttattttgggaggttgaggcgggcggattacgaggttaggagatcgagattattttggcgaatacggtgaaatttcgtttttattaaaaatataaaaaattagtcgggcgaggtggtaggtatttgtagttttagttattcgggaagttgaggtaggagaatggcgtgaattttggggggcggagtttgtagtgagtcgagatcgcgttattgtattttagtttgggtgatagtaagattttgttttaaaaaaaaaataaaaaagaatgagttatcgtgtttgttatttgttgtaaaattttgagtgtttttattttattttgaagattattgtttagaattgaaattagacgttgttaatattgattgaagttttaagtagtaaaaaattagtgtgagttttagaagtcgtttttggaaatttttaggttaatagtgttaatgtatagatatatggttgtatgtagtatatttatatagtaaattagatgttatgttgggggaaaatgagttttttaattaagttttttaatattaagtagttagataattaaacgaattttatttaagtaaagtttggtatttttgtttaggtgagggaaatttattttaaaatgaaaattttaaaggtaaaataaattcgtttaatatgtttattaaatatttttatttattttgataagaaatgtatttttgttttttatttgtattatagg

SEQ ID NO: 486 - DNA, 7900 bp, Artificial Sequence
  chemically treated genomic DNA (Homo sapiens)
tttataatataggtaagaaataaaaatgtattttttgttaaaataagtaaaaatatttagtgaatatattagacgaatttattttatttttgaggtttttattttaaaatgagttttttttatttaaataaaaatgttaagttttatttgggtaaaattcgtttaattatttaattgtttaatattgaaaaatttaattaaaaaatttatttttttttaatataatatttaatttgttgtgtagatatgttgtatatagttatatatttatgtattaatattgttaatttagagatttttaagggcgatttttgaaatttatattaattttttgttatttaaaattttaattagtattagtaacgtttggttttagttttggatagtgatttttaaagtggggtagaaatatttaagattttataatagatgataggtacggtggtttatttttttttattttttttttgagatagagttttgttgttatttaggttggagtgtagtggcgcgatttcggtttattgtaggtttcgttttttagggtttacgttatttttttgttttagtttttcgagtagttgggattataggtgtttgttatttcgttcggttaattttttgtatttttagtagagacggggttttatcgtgttcgttaggatggtttcgattttttgatttcgtaattcgttcgttttagttttttaaagtgggtttatttttataattttaatattttgggagagcgaggtaggaggattatttgaggttaggagtttaagattaatttgggtaatataaattgtttttataaaaaataagttaaattagttgggtgtggtggcgtttgtttgtagttttagttatttgggaggttgagtgggaggattgtttgaatttaggaggtagaggttgtagtgagttgagatggtgttattgaattttagtttgggtgatagagtgagattttgtttttaaaaaaagaaatagattttataagaggtatttgtatggatatgttaagggattcgattttgtagttttgtagtttttatatgtgtttttttttgaaagggatttgttgagaataggtttgtatgtatagtaacgtttttttgtttcgttttgttaaaggaaggtatagtttttatttattttatttttttttttagtgtattgttttggggtgtaaaaattttaggggttattatcggaagagatttattttattttttttttaagtgtattgttttggggtgtagaaattttaggggttattatcggaagagatattttgaaatattggttttggagaaggtttttttattgattaattataaatttttattagggtattttgtgtttttttgtgttagatatatttttgtaaagggtgaaattaggtatttttaattttggtttaggttggagtgttttgaatttagatatgtaatagaatgggatggtgggaatttttatttaaaaattttatttttattttttattattaaagaatattaaatttttaagaaagaattttatgagatatgaggaagaaaggttaaagattaaaaatgattttttttttaaatatatttaaatataagtagttatttttagttattttttatttttgtttttagggtgtgttattatttaaaaagaagagtatttttaaataatgttaatagtatggttagtgtttgagtttttagaaaaatataatttaaatggttttttcgattgttatattttttaagattatggattaaattttatgtgatttatatattggatgatttattagggtaattaaatagatttattagtatgtaattaaaatttattaaataatatgatgattttttttaattatagttaatttttatatttaatatttttttaattatattaaatgggggattgtttttagtagtatgaatattttaaattttaaaagaaaaaaagtagaaaaggtgattacgatgttttataaaaaaagtaatgggatcgcgtgtagtggtttacgtttgtaattttagtattttgggagatcgaggtaggtggtttatgaggttaggagtttaagattagtttggttaagatggtgaaatttcgtttttattaaaaatataaaaattagtcgggcgtggtggtaggcgtttgtaattttagttattcgggaggttgaggtaggagaatcgtttgaatttagagggcggaggttgtagagagttaagattgtgttattgtattttagtttgggtaatagagtgagattttattttatcgaaaaaaaaaaaaagtaatggagttattgatttttatatatgattatttatttttataaatgattatttatttttaaaagttaaataaaagttttttttttttatttttattaaaggagtattatgttttttattatattttttatttataagaatttttattattagttatatagtgtattataaattaaattagaatatatttttttgttttataagttattataaaaatagattagttatattattttaattttgattatagttagtaaattattattagatgtattttatgaaagttataatttatatgtgatttttatattagttatgttaaattttatttgaattaaaaataaagttagttgggtgtaggggtttatatttgtaattttagtatttttggaggttaaggcgtttaagtttttaggggtttgagataagtttaagtaatatagtggtattttatttttatttaaaaaaaacgataaaaattcgttagtttttttgatagaagttaagtttaatttgggatattggatgattggtttgataataaagagaagttttagttattatattaagtggtagagattttttagaagttgaatgtattgagtttgttgtttttgagttttgattgaattatatttaagtatttaatattagtaatattttaagtattaaggtaagtttaaaatataaatatttatatattgaaattaaaagaaaatgtttaaatgtgaataaagtagtagtattttgttaagaaaatatcgtattagtaaaaatgaataatttttttttaatttttaggttaataaagggtttttaagtgatataggaaggagtataattaatagtttattttataagttttggtaaagttttttgtattttttttagaaaataagaaaagtgaaaggttttagtgttagggaatgtatgtttttataagtttttggtttttaattttttgtttttaatataattgaagagggatttattaagtagttaggagattgattattaaaaataatttttaatgataagttattttgatttttggtatttaatttttaaggtagtttgaagaattaagtgattatgttatagtgaaattttttttatttttatatatatgatattttagttatatatttaaaaaaatgaaaaatagaattaatgtgaaattttaatttttaataaatattttatttattttattaaaagatgtatttttaattaataatataaaaagtaaagttttattaaaatgtattttgtagatttgattaataatgtattaattgattaattgtgattagtaatattttatgaattttttttaatatttagattattggtaataaaatttaaaatgaatttatatatttgtttgttttaggtaagtatgatatagtaattaataaaagatttaagtattaaaaataatatattagtattatattttatagaagtcgtggtagaaaatataaatttagggaaataggaaaagatttagtttttaattaaaaaatttgtttgtatatttttaaaaaattaataatggtaagtgggtattaaattattgttatttagattttattggatattttaagggtaattaattttatttaaaaatgttaatgtttaaaatagttggaatttagattttttgaaatttaagaaaaaatttaaatgttaatttaaaaatgtataagggggtttgtagtttttttaaatttttttgagggtatataggaaaaattttaagttatgagtttagagaatgatagattttattaggtaagtgtaagaattagaaataaatttattagtagaatatatttaatttattttaaaataatttgaaaaaaatagaatttggttgacgatggatagatagttttttaaataagtagttattagtagaggaagtattgtatttttatttttatgagtttgtttttagtttaatttttaaataaaatagcgtggatagtagtatttgtgcgtgttggaagatgagagatggaagggtagttttttgaaatattataaattagttttataatttagtggtttgaaatttaattgaatgttaaggaaagtttattttttatataaatgtaagtattttttttaattataattatgtgatttaaacgtgtttggaagttatatttatttgtttaatgtttagtttttttttatgtatatattttagattaaatatagtttgtgtattgtgttgttgtttagaagttagacggtaatgaataaatgtagttttataatttatatcggtgttaaatttatagaaatggtagttttcgagtttaattttagttatagtatagttttaaataaaagttaaatgtagaattgttaataaataaagtatgtttaaaatagattaaatttttttttttttttattgatatgtttatataaaataaagaattttaatttatagtatataaattttgtaataaatttttttagttaagttataaagtttagtaaaaatttaaattagaagtgtagtttttttgtagaaggttttggaatatagagaggtaaaattaagttggtgtgtgtgtagggggataggtttaatatttttaatttaaaaagttgaaatttgaaatgttttaaaatttgaaatgatatttaaaggttatgtttaaaggaaacgtttataggagtattttagattttagattaaggatgtttaaataatacgtatgtgtaaatatgttaaatataaataaaaaaaataaaaatatttgaaatttgaaatattttggttttaagtattttagataagggatatttaatttgtattttttttttttataaatatttttatgtaaatgattaggttttattttataatgttatttatattttaaaatagtttagtttgattatttaggtttggagaagggaataggtagagaatgttgaaaggaatatgtataaaaaataaatatttaaaagaaaaagaaaagttttttaggttttagattaatgttttattatatattttatttaatttttattttatatagtatattggttttaaattggaaaataaagagtgaattatagtttgatggaaatgtgtagtataaagattttataatttaatttagaaattttggttttagaaatttttgttaagaataaatattaataatatgtaaataaattaagttatagtatttttgtttaattaattattttattgttttgagaaggagtttcgttttgtcgtttaggttggagtgtagtggtataattttggtttattgtaatttttgttttttaggtttaagcgatttttttgttttagttttttgagtagttgggattataggagtttgttattatgtttagttaattttttttgttttttttttttttagtagagatagggttttattatgttggttaggttggtttcggtttcgaatttttgattttaagtgatttttttgttttggttttcgaaagtgttagggttataggcgtgagttatagtattcggttttatgatttaatgtttatgggagataaataatatagggaggtttttgggtgaaatttttattttagaattaattatttattttgagaggcggttttgttttaatgtagtaaagttttgggataagttttatttttatttataatgtttgttttttttataggaaaagaaatgaaatataaattaggtatttaagaaaaggtattagatttaatttttatttgtaaagtaggaaggataggtgaagtataagttaaataagaattaggatataaaaattaaaataaatattgaaattaattattgaattaaaatagtgagtttaaagtaattattggatgtaagagggtattattttgtgaaatatgttgtatttatagaattagttatgagattattgagttatttttttatagtgttgggaaaatggtatttttgtatttattgtattttgaaaaatatatttatgtaaagtgtttaattttaaaatgaatgttaaatttatttttatagttaattcgttataaaattaattttgatggttaaagtaaaatattaataatttaagtttgtgtgtttagttttagttataataataaagaatgttttttagtagtttttttttttgaatatattaaatagtttattggtgtgaattcgtatattttaaatttaaggtaggattaaaatgaattttattttgattaagaataaaggttgtattgttttgtgttattttatagttttgtttagttaggaggaggtattggattattgtagtattgtaatcgttatttttatagttgttataggtagttataagttttttagattaacggtttcgtttatatatatttttaaataattgtgtgaggtggggaaaaaaaatattagtagaagaaaataagaaagatatattagaaaattatttatgtattttggttatatatgattattaagtttgtttttttaatttttggtagtttttttgaatagatataaaagtttgagatatttatttaaagtttttatttattttttagaagttaataggtttataaaaaaaaaaaatagtatataattattgtattataaaaatgattatttattttgttcgggtattgttgtaatgatttatgtatattattatttttaatttttttatgagatttatgaggaattattttaggaggtaagttttgttaaaagttttatttgataagtgagtaaattaaagtatagagatttagaaattttgttaagtatttattaatgttattttaaagtgttaagtttaagagagagttaagagataatttttaattaggagatattagtatttttttttggaatatttatttaattttttttttttttttttttttttttttttttttaagagataggttttttttatgttgtttaggttggttttaaatttttgggtttaagtttttatttattttaattttttaagtagttgggattataggtacgtgttattgtgtttagtttatatatttttttgatgttgattattattagatattgttttaggtgttagagatattgtagatattagtatttttttttatatagttgattgtaatagggagatattgaataaataagtatggtaattatatatagatttttcggtttttttttagtatattaaagttaggtaggttgagtttagaattatagaagaaaatatataaaaaaattagaattgaaagcgtagatttttttgttgggtaaattaattttttatatataagttggtaggaaagattttatttttattgtagtgtgatatgatcgtattacgtcggtgttattggtatgtatttgagttaggttatagaaagttaagatatggtttttttgagaagttaaattaaaatattttaaggtttgtttataattttttttgattttaatgttatttgtaagaaaaaaaaaaattatacgagataatagatttaagatttagttaagtattagagaaggtttatatatgaagaataaaattttaatgaaagaattt

SEQ ID NO: 487 - DNA, 8883 bp, Artificial Sequence
  chemically treated genomic DNA (Homo sapiens)
ttagttaatttttgtatttttagtggagatagggttttattatgttggttaggatggtttcgattttttgatttcgtgattcgtttgtttgggttttttaaagtgttgggattagaggtatgagttattatgtttggtttaaatttaattattataaatttagttttatattttaaatatatgttatttttatttgttttttgttattttttttgttagtatagtggtttaagttttaattcgttttttttaattattgtattggttttataattggttttttagagtttttttttttttatattttatttaaagaattttttagaaatgtaaattttattttatataaggtattatttttatttttaaattaaataaataaaaaaatgttaaaaaattttttaatttgtttataagtatgttttagttatattggatatttttttattttttttacgaatttattatttttttgttttagtttttggtttagttgtttttttagtttatttggaaggttttggatattgatgtttttttttatttttttttttcgtatttttaaattttatttttagattttagtttaggttttatttttttagagaagtagtttttatttgggtttttttatatgggaatggttagtttgtttttatagtggtttagagatatgaaattatttttttaagggttttatagtttaggaatggtagagttgtgttttagatttagaattatatgatttttattttttaataagtgatggagttaagtaaaggttttatggtaggggggaattagatttttttttaggatgtgggattttgtgagagttatttgtatttttatgatagtttgattttttttagagagtataggaggaatagaggggataggcggtattgaattaattgtatttttttagagggttaatttgatgattaaggagaagttagattttagattggggttatgttttttgtttagtttttgattgggatttagtttgttattagagtaggggtttttttttagtttttaggttttaaaaaaagtttaaaagtagagatattagaaggataaattagtttggtatggaaagtagagttgtggattgggaattggatattaaagtttgggttttggttttttttttgggttattgtaagttttggttaagttatatttttttgtgttttaatttttttttttatgatgataattagaatttttatgtaagtgtatatgatgtttttttgggttgtggattgagtgacgttttatatattattatttttattattattttttaaaggttatataagttagtttttataattttgtgacgtcgatattatttttttattttataaatgagaaaattgaggtttagagattagtgattaaaattcgaatatgtgttttttttattttattatgaaagaatgaatttagagatttttcgtgggttgagcgtattatttagttggtattgaatttagatttttattttatagtaaagattttggtttttgtaatgagttgagtttaggtttttttttttggttaggttttggttgtttttttttattagttgagtcgtagagaagatttcgtgttaaatttttttttaaggtagattttattaagtattagttatgtattattcgaaaagttattttgattttttgtgttttagtttttttttttgtaaattaaggatttagttttttaggattgtttgtgaagagtagattagtatttgtagaatgtttagaatagtgttatagtcgttagattaaattttttttttttttttaaatattatgtggggagtagtgtttttgggttttgggtttagtttgaaatttagtagaataggtattttatgtttttattgataggggttttgttaggtcgtcgtagagtttatggatttgagttatcggttttattttagaagggggtgaagaggtagggaagggttggggagttttttgggatagggagattgtttattgaaatttgggtgtttgggatattggaggaagaataagaaagaagttttgggaggtgacgattttggtattatggtggtttttagaggtagggatagagtgttggggtgagagtcgttgaagaaaggtgtttgaaaggttaagggattgaggttgtgggaagttggggtttttgagaggttttgggattagagatgggggttggatttgttgggttttagatagcgcgtttaacgtttttcgtagcgcgtttcggagtcggttttagcgtcgtttaattagtttttatttttttcggtgaaattgttaaattaaaatgaattatttggtttataatggtcgaggcgtttatcgggggcgggcggattcgcggtagtgttttatttttgcggcgtatacggtttcggcgcgtttcggtttatgttaacgaggtttggaacgtgagtgggattatagcgcgtcggtggaggggtcgggcgggcgcggggcgggcgggggagcgggggtcgcgggaggggtcgggtcgtcgtcgtttaggatcgggttttaaaatggttatacgcgtattttcgtagcggaaaaacgtgagtattttggtttttttttaggggaaaagtaattcgcggttttttatcgaattttttattaatttttttttttttttttttacgttcgtaaaagaggttttcgttttttttttttcggtttttttcgatggtcggggggggcggtgggggggtattttttacggacgttttcgtttcggttgtcgtcgtttttttcgtttcggagattttttttttttttttttttttttttttacgtaatatatagaaatgcgcgaggttgtggttggtttttatttttttttcgtggttgtgtgtatgcggtgggattgtgagagtgcgtttatgagaattgtgggcggcgttggttgtttttaagtgtggtttttttggcgataggttttgtgttcgagtgtggtgtgtttgcgcggttggggtgtgtagatgtggatttttcgaggtttttttgcgtttttttcgttgcgtacgattgtgtttcgttggtgtttttagtagggatttgattttgtgtgtgggggtgtgtggtttttgcgattgtgtttgggtggtgtcgtcgttatgtcgggcgtgtgtgatttcgattgtgttggattgtgtgttcgtgagtcgttgcgtttgattgatttcgttgtgttttgttgggtagtgtgcggggttgattaagtcggtttttggggtagtgttaggtggtgtttgtttgttgtttttttgtggggttggattttgtgtggttttgttcgtattgagttgtatgtttgtgtgtttgtgttttttagaggtgcgtttgtaaatcgttgggggcgggagtggggggagggcgagcgagagatcgaggcgttggtgggggcggcggtatgggggcggggagcgggattttatattttattttaaattatgatgtattcgggagttagttgttggtttgggtgggcggatagcgttcggtcggcggttgttttgttcggaggttcgtttgtgtttaggtgtttgaggggttcgttggtgagtgggaggtttttttaggtttgaagttgagtagcgttcgtcgaggtcggcgttttcgagtcggtagttgcgggtttcggttttcgttgtatttcggttttatttatttttggttagtttcgtgggtgcggtcgtcgggttttaagggagaggtttcgaaaggataatgggtatatttattaggtttcgagtttcgggtggggatattcgggattattttttgggaagattttttcgtttttttttcgggtgagcgacgttgtcgtttgggtttgatattcgtcgtattcgagatcgaggtcgaattcgggttttgggagggatcgggttagtggggttttagttcgggttgaaagaattttgttttgttaattattgtaattgttaatgttattattattataatcgttattattaatatttattttaattaaaataattattttagagcgtagtagtttgttttttttggtttttttggcgggagaataaagtagcgggttttttttcgttatagtcgttttttaagttgttgggtttgaggtaggaagagaaaatggagagaggtacggatatagagatttggttataaggtaaatattaatttttagcgaatacgtaatattaatttttcgcgaatacgtcgggaatggatggattttttttttttttttttttttttttttttttggattagaagaggagaaagaaaatttttcgtattgtattgtaatttagggaagaattatttttatatgtttattaaagtcgcggtaaatagaaggaggttttcgtagttaatttaagatttcgatgtgtgattataagtttgacgatttaggtaaaataaattaaataaaatttattaggaaaaaataaaagtaagtttaattttgttatatttttgaaagtagtgtcgggtttgtttttattttttttttttttattttgtttattgttgtaataaattattagaatttttttttattttgtttaaatttcgaaaaatcgaaaattatttcgtaggggtggtggaggggaaggtgggggattttttttttttgtttttttttttttttttttgttggtttttatttttttttttttttttgtttttttttttttttttttttttttttttttttaattagtagggagacgagaaaggatttgaatagattagatatttttttttaagttttttttttaattttatttttgtaggaaagtatagtttttggaattgggttttggtttcgttttgggttggaggtgggtggatgggggttagagagagaatgaggtgggggggattttaaggttttgttttatcgattagagtttgaagattattcgttttttttaatacggattttcgtttatttaggttcgggattattttttcgcggtgtagcggtagtcggagatttggttgaggaggtaatcgcgtagatatttttttgtttagaaaataaatattgaattagatcgattttagttggagggttcgaaaatgttttagatagtttgtcgggaggggttgttgttgttgttggattaaatagttatttttgattggttatgtatagggttttttaaggcgggtggggggaggagggggtagaggaaaggttttaaatatttgtaggttgggggcggaaagttgtttgcgattttttggattggttggtcggggataggaggtaatttttagttattgatttttattttttttttttttttttttttgttttgtttttttttttttatttttattttttttggaaattcgttttgggcgcggtagatcgtttaggattatatcgtagcgtaattgtaggttttttagcgaaaaagggggaaagtaaagattcgggtgtgtattttttttttcggttttcgttttttttcggcggagtggagattttatttagaggggtcggtttttttaaatatgttttaggtgagtttttaggggaatggtgtcggtggaaacggtgtttaggaaggttttgtgtttcggtttggggtgaggaaggtttaggatagaggagagtttatttttagattgggggtggggggaggggaggattagttagagtttggaatcgggatttgattgttgtagttgtttttgtggtatttagcggtttttttttttttttatttagggtaaaattagttagttggatttagtcgtttaggttttttttattggtttcggttttgtggacgttttttaaggtcggtaattttggggcggttgtattcgggtggtatagattgtgtttggagttttcgtaggaggaaggcggtagtttttttggttagtgtagttttagttcgagtgggttttgattttaggtttgaggtttagggtggggaggtaggaatatttttttttttcggtagaggcgaggatggtggtgttgttttttggtgggtttggtatttgtgtaggtttggggtttttttagggtgttgtgttggtgtgggtttagaagagagattagaggttgggtttaagggtttgaggttgtttttatttaagaaattttttgtatgggggattgggtttgtttgagatttgtttttaggaagaattttttggggttttttgttttgttttggtataggtggaaatattttggttgtttggtaattgtagatgaggattttttgttgggggttataagtagggttttcgtagtataaagagagaggagttgtagtcgttaaatattttagaacgatttagtttaaaatttttttttttttttattttttttaaataaaaataaataaaatttttcgggcgtttttttttgtaatttaaattaagtgatgtagtttagtcgttaataattattagtgtttgtgagtggtttttttggggtatggatttttggttggtaattttaaatcggtaggatttttttaaaatgtggggaggagtcgggagaggttttttatagattttgggatttaattatatattttttataaggaattttggcgatgggatatttataggtgtttggagaggatatttgtggttagggttaatttatttggaatatgtatttttattgttttttaggaatttatcgttagagtaggagtttaagaattaattggagggtaaaaatgtgttataatagagtttgagtttagtttgtaattgtagtgtatattgttattcggttagaagttggggtttaagtatggattattgggtttatatcggtgtgttaggacggagagtagtgaggtagggaattaatattttgaagtttgtatgttttttaggggttggtatatttttggtatatttcgttgttgttgggagtaagaggatttggttgatatatttttggtgtatttttagtggttttggtgttttggtggttgtattttatggatagagatttattgtttttattaaaattataaatttatttttaatgaagtgttagggatttattgtttttatagtttgtatatattaggatttagggaattttgtggtttttgtgttagatttggggggttggtatttttaaagaaggtgtatagtagtttgaattttgattttttgttattttgggtgtttagtggtaattgagttaagttttagaggaggttgtagatgatttatttttttttttggggtgggagggatggtttttaggatgatttttgtttagagtattgtagtggtagtatgggagtttaatggttgttatgtatgatttagatggattttgtatgggggtaaattgtttttttgtatttgttttttttttttaaatatttaattatataatttagagagtagaaagtttattttaaataatttatgtggtgttgattatatatgtataatttataatttataaattttggtttttgagttttttgatttttttgttttggtttttgttggtgtttagttttatttggatgaagttaggtgatggaagagttttagtatatttgtgggaagtagagtggttgtggttatttcggagtatgtttgtggggttataaggtggttttattgttttgggaatataggagggttgagtaaagtgagattattgttttggtttggtttttttatagataggttgtgagtgatttgatattcggttaggtagtttttttattggtttattttttttgttaataatgtttatttgaacgtttgtatagtatttttaaatgtataaaggaggtattttttttattttttaaagaatattaaggtaggagatggcggtgaggggggttggaagagtttaagggttttatgatattttgttttgtttttggatgggagtttagattttattggttttagggaattttttaaatgtttagttttattttattttagttaggtttttttttgagattcgattttattttagagtttagttgagtagaacgaggtggattgtgtagggaggttgggttagtattattttttttttttggcgattttttatttttgtttgagtgggagtaaagattcgttgggcgggtagaggatttatagtggatttgtttagtgtagatagatatttttttattttttagcgggggcgaatgtgtgtgtgtgtgtgtgtggagggagttggtttttcgggattattttttgttagttttggcggagtggattttagttttcgtagtttttattttttaattttttatttttattcgtatcgggtttttgggtgtgtgtttgtaggtgggttgggaatattgttgagaggttaagggaggtttttaaagtaacgaatttttgtttgatagatttttcgttaaaattaaagagtacgattcggaatttgttttttttttttttttttaggtttgagaaaggggatagagtaattttttttttgtttttttgtatatttttttttttttgatttttttttttgtgtttttgtcgttggttgtattttttttttttcggtgtttttgtcgtttttttttatttttgtttttttggtttttagtttttgtgttttttaggtatttttttttttttttaatttagagatttttttttttttttattttagttttaatcggtttttcgttttagttttacgtggcgttaattttgtttgtttttttttacgtttcggtgcgtgagtttttttttttgttttttttttttttattttagtttacgtcggtgggttaggggcggtcgttagagcgggtattcgtttgtttgtttgtttgtttatagg

SEQ ID NO: 488 - DNA, 8883 bp, Artificial Sequence
  chemically treated genomic DNA (Homo sapiens)
tttgtgggtagatagatagataagcggatgttcgttttgacgatcgtttttgatttatcgacgtgggttggggtaaaggggagaagggtagagagaggaatttacgtatcgagacgtgagaagaggtagataaagttagcgttacgtggggttagggcgggaggtcggttggggttagggtgggagggaaagagggtttttggattgggagaagggaggggtgtttgggagatatagagattgagggttaaaaggatagagatggaggaagacgatagagatatcggaagaaaaggaatatagttagcgatagaaatatagaaggggaaattaggaggaaggaaatgtataaggaggtaagaaagagattattttgtttttttttttaggtttaaagggaagaggagggaataaatttcggatcgtgttttttggttttagcggggaatttgttaggtaggggttcgttgttttaggaattttttttggttttttagtaatatttttagtttatttataggtatatatttagaaattcggtgcggatggaagtagggaattagaaagtggaggttacggggattgggatttatttcgttagagttggtagagaataatttcgaggaattagttttttttatatatatatatatatatattcgttttcgttggggagtgagggagtgtttgtttatattgagtaaatttattgtgagttttttgttcgtttagcggatttttatttttatttagatagagatgagaggtcgttaagggaagaagatggtgttggtttaatttttttgtatagtttatttcgttttgtttagttggattttgaagtgaggtcgagttttaaagagaggtttggttgaggtagaatggagttgggtatttgaagggttttttgaggttagtggggtttggatttttatttaagagtaggataggatgttatgaggtttttgaatttttttagttttttttatcgttattttttgttttggtgttttttgggaaatgggaggaatattttttttatgtatttgaaagtgttgtgtaaacgtttaagtaaatattattaataaggagaatgggttagtgagaaaattgtttggtcgaatgttaagttatttatagtttatttgtgagagagttagattagagtaataattttattttgtttaatttttttgtatttttagagtagtgaaattattttgtgattttataagtatatttcgagatgattatagttattttattttttataggtgtgttggggtttttttattatttggttttatttagatagagttgggtattagtaagaattaaaatagaaaaattaggagatttaagggttagagtttgtgagttgtgagttgtatatatatgattaatattatataagttgtttaaaataagttttttgttttttgaattatataattgggtatttaaaagaagaaaataaatataaaaaaataatttatttttatgtagagtttatttaaattatatatagtagttattgagtttttatattgttattgtaatgttttggataggagttattttaggaattattttttttattttagaagggagaatggattatttgtagttttttttggagtttggtttaattgttattagatatttaggatgatagagagttaagatttagattgttgtatattttttttgggaatgttagttttttaggtttggtatagaaattataaaattttttaagttttggtgtatataagttgtaaaggtagtaggtttttgatattttattggaagtgagtttatgattttggtggagataataggtttttatttatagaatgtaattattaagatattaaggttattggaaatgtattagaagtatattagttaggtttttttgtttttagtagtagcgaaatgtgttagaaatatattaatttttgggaaatatataagttttaaggtattggttttttattttattgtttttcgttttgatatatcggtgtgagtttagtgatttatgtttaagttttagtttttaatcgagtgatagtgtgtattgtagttgtagattgagtttaagttttgttatgatatatttttattttttaattaatttttaggtttttgttttagcggtggatttttgagaggtaatgggagtatatattttagatgaattgattttggttataaatgttttttttagatatttataaatattttatcgttaaggttttttgtaagaaatatatgattggattttaggatttgtggaggatttttttcggtttttttttatattttaggaaaattttgtcggtttaggattattagttagaggtttatgttttaaagaagttatttataaatattgatggttgttggcgattaagttgtattatttgatttggattatagaaaggaacgttcgagagattttgtttgtttttatttggggagaatgaaggaggagggagattttagattgaatcgttttagagtatttgacgattatagtttttttttttttgtattacggagattttgtttatagtttttaataggaaatttttatttgtagttgttagatagttagaatatttttatttgtgttagaataagatagaagattttaggagattttttttggggataggttttaagtagatttaattttttatatagagaattttttagatgaaaatagttttaggtttttagatttagtttttggttttttttttgggtttatattagtataatattttggagaagttttaagtttgtataagtattaaatttattagggaatagtattattattttcgtttttatcggagaagaggggtgtttttgtttttttattttaggttttaggtttgggattagggtttattcgagttgggattgtattagttaggaaggttgtcgttttttttttgcgggagttttaggtatagtttgtattattcggatatagtcgttttaaagttatcggttttgggaaacgtttatagaatcgggattaatgggaaaggtttggacgattaagtttaattagttggttttattttgggtggaaaagggaaaaagtcgttgaatgttatagaggtagttatagtagttagatttcgattttaagttttggttggtttttttttttttttatttttaatttgagaatgggtttttttttgttttgagttttttttattttaggtcggaatataaggtttttttagatatcgtttttatcggtattatttttttgaaaatttatttggggtatatttagagagatcggtttttttgaataggatttttatttcgtcggaaaggggcggaagtcgaggaagaggatgtatattcgggtttttgttttttttttttttcgttgagaggtttgtagttacgttgcggtgtggttttgggcgatttgtcgcgtttaaagcgagtttttaggaaagataggggtggagagaaagaggtagggtaagagggagggagagagagaaatgggggttaatggttgggaattattttttgttttcgattaattagtttagggaatcgtaaatagtttttcgtttttaatttgtaggtgtttggagttttttttttatttttttttttttttattcgttttaaaaaattttatatatgattaattaggaatagttatttagtttaatagtaataataatttttttcgataggttgtttggaatattttcgaattttttaattgggatcggtttggtttagtgtttgttttttaagtagggaggtgtttacgcggttgtttttttagttaggttttcggttgtcgttatatcgcgaagggatagtttcgggtttggatgggcggaggttcgtgttgggaaaggcgaatagtttttagattttggtcggtgggatagaattttgaagttttttttattttattttttttttgatttttatttatttatttttagtttaaagcgaaattagaatttaattttaggggttgtatttttttatagaaatggagttgggaagggggtttggagagagatatttgatttgtttaggttttttttcgtttttttattgattaagagaaagaagaaagagagaggaagagagagatagaaaaagaaaaggaaataaagattaataaagggggaaagaaagaaataaaggggaaaagttttttatttttttttttattatttttacgaaatgattttcgatttttcggggtttagatagagtaagggagaattttaatgatttgttatagtaataaataaggtaaaaggaaaggaggtaaaaataaattcgatattatttttaaggatgtagtaggattgagtttgtttttatttttttttagtggattttgtttaatttgttttgtttaaatcgttaggtttatgattatatatcgaagttttggattaattgcgaaggtttttttttatttgtcgcggttttggtggatatataggaataatttttttttggattgtaatataatgcggaagattttttttttttttttttaatttaaaagaggggaggggaggaaagaagaggggaatttatttattttcggcgtgttcgcggggggttaatgttgcgtgttcgttgggggttaatgtttgttttatgattaagtttttgtgttcgtgtttttttttattttttttttttattttaaatttagtaatttagaaaacggttgtagcggaaaaaaattcgttgttttgttttttcgttaaaggagttaaaagggataaattgttgcgttttgggatgattattttaattaaaatagatgttaatgatgacgattgtgatggtgatggtattagtaattataataattgataaaataaaatttttttaattcgagttagggttttattaattcggttttttttagagttcggattcggtttcggtttcggatgcgacgggtattagatttaagcggtaacgtcgtttattcgaagagggggcgggaaaatttttttaggaggtgatttcgaatgtttttattcgaggttcgaggtttggtgaatgtgtttattgttttttcggggttttttttttggagttcggcggtcgtatttacgaaattgattagaaatggatgaagtcggagtgtagcgggaatcgaagttcgtagttatcggttcgaaggcgtcggtttcggcgagcgttgtttagttttaagtttggaggagttttttatttattaacgaattttttaaatatttaggtataggcgggttttcgggtagagtagtcgtcgatcgggcgttgttcgtttatttaagttaataattggttttcgaatatattataatttggaataaaatgtgaaatttcgtttttcgtttttatgtcgtcgtttttattagcgtttcgatttttcgttcgttttttttttattttcgtttttagcgatttgtaaacgtatttttaaaggatataggtatataggtatataatttagtgcggataggattatatagggtttagttttatagaagggtagtaaataaatattatttagtattgttttagaagtcgatttggttagtttcgtatattgtttaataggatataacgaaattagttaaacgtagcggtttacggatatataatttagtatagtcgggattatatacgttcgatataacgacgatattatttaaatatagtcgtaggggttatatatttttatatatagaattagatttttgttgagaatattaacggagtataatcgtacgtaacgaagaaaacgtagaagggtttcgaagggtttatatttatatattttaatcgcgtaggtatattatattcggatatagagtttgtcgttaagaagattatatttagaagtagttaacgtcgtttatagtttttatgaacgtatttttataattttatcgtatgtatataattacgaagaagaaatgaaaattaattatagtttcgcgtatttttgtatattgcgtaaggaaaagggggaaggaaggaagagagttttcgaggcgggaggggcggcggtagtcggggcgggggcgttcgtggaaaatgtttttttatcgtttttttcggttatcgaaaggaatcgagggaaagggagcgaagattttttttgcggacgtggggaaaaagaggaggaaattgatgaagaattcggtgggaggtcgcgggttgttttttttttagaaaaaggttagaatgtttacgttttttcgttacgggggtacgcgtgtggttattttgaggttcggttttgagcggcggcggttcggtttttttcgcggttttcgttttttcgttcgtttcgcgttcgttcggtttttttatcgacgcgttgtaattttatttacgttttaggtttcgttagtatgggtcgaggcgcgtcggggtcgtgtgcgtcgtagagataaggtattgtcgcgggttcgttcgttttcgataagcgtttcggttattatgggttaaatgatttattttaatttggtaattttatcggagggagtggggattggttgagcggcgttaggatcggtttcggaacgcgttgcggggagcgttggacgcgttgtttaggatttagtagatttagtttttatttttaattttaaggttttttaggaattttagttttttataattttagttttttaattttttagatatttttttttagcgatttttattttagtattttgtttttatttttgaagattattatgatattaaaatcgttattttttagggttttttttttattttttttttagtgttttagatatttagattttaatgggtagtttttttattttagaaagttttttagtttttttttatttttttatttttttttaaaatagagtcggtaatttaaatttatgggttttacggcggtttggtagaatttttgttaatagggatataaaatgtttattttgttaggttttaggttgagtttagagtttaggaatattgttttttatatggtatttaaaaaaaaaaaaaaagtttaatttagcgattgtaatattattttaggtattttgtaaatattaatttattttttataaatagttttgagaagttggatttttaatttatagaagagaaaattgaggtatagaaagttaaagtaatttttcgaatgatatatagttagtgtttggtggagtttgttttggaaggaaatttgatacggagttttttttgcggtttagttgatgaagaggggtagttaaaatttagttagggaaagggatttgggtttaatttattgtagagattagggtttttattgtggggtagaaatttgagtttagtgttagttggatgatgcgtttagtttacggagggtttttgggtttatttttttatggtggagtggaaagaatatatgttcgaattttagttattgatttttgaattttagtttttttatttgtaaaatggggagataatgtcgacgttataaagttatgagaattaatttatatgatttttaaaaggtggtggtgaggataataatgtatggaacgttatttagtttatagtttaggaaaatattatatgtatttgtatgggagttttggttattattatagagaaagaaattaagatatagagagatgtgatttagttaaaatttatagtaatttaaaggaaaagttaggatttaaattttggtgtttaatttttagtttataattttattttttatgttaggttgatttgtttttttagtgtttttgtttttgagttttttttggagtttgagaattgggggaaaatttttattttggtaataaattgagttttagttaaagattgagtagagagtatggttttagtttgggatttggtttttttttggttattaggttgattttttgagaagatatagttaatttagtgtcgtttgttttttttgttttttttgtgttttttgaaggaagttaggttgttatggggatatagataatttttatagaattttatattttaagaaaaagtttagtttttttttattataaggtttttgtttggttttattatttattagaaaatgagagttatataattttgagtttgaaatataattttgttatttttgggttgtgggatttttagagaagtgattttatgtttttgagttattgtaaaaataggttagttatttttatatgggagagtttaggtggggattgtttttttgagaaaatgaggtttggattgagatttaagagtgaaatttgggggtgcgaagaaggggggtggggagaagtattagtatttagaattttttaggtgggttgaggaaatagttggattaagggttagaatagaagggtggtaggttcgtgaaaagaatagaaaagtgtttagtatggttggagtatgtttgtggataagttaaaagattttttgatatttttttgtttgtttggtttgaaggtgggggtggtattttgtatagaataagatttgtatttttagaaagttttttggatgaagtgtggagggggaaggattttgggaggttagttgtggagttaatgtagtggttaggggaagcggattagagtttggattattgtgttggtagaagagatgataagaggtaagtgaagatgatatgtatttggggtataaaattgggtttataataattggatttgggttaggtatggtggtttatgtttttaattttagtattttgggaggtttaggtaggcgggttacgaggttaagagatcgagattattttggttaatatgatgaaattttgtttttattaaaaatataaaaattagttgg

SEQ ID NO: 489 - DNA, 8129 bp, Artificial Sequence
  chemically treated genomic DNA (Homo sapiens)
agggtttgagtggtggttatagtgtgtgagtggtgttcggaggaagtgagtggtggttggagggtgtgagatttggatggagggttttagtggtggtagtagtgtgtgagtagtggtcggagagtgtgagtggtggttagagggagtgtacggtggttagagagtataagtggtgattggatggtatgagcggtggttggacggtgtgagttatggtcggaggttttgagtggtattcgaagggtgtggtcggagggagtgagttttggttggagggagtggttagtggtaggaaggtgtgagtaatggttagatggtgtgaggggtggttagagggagtaagcggtggtttgagggagtgagtggtggttagagggtgtgagtggtggttgaagggtgtgggttgtggtcggagggagtgagtagtgattagatatgggatttggacggagggtttgagcggtggttggagggtgtgggtagtggttggagggtgtgggtggtgattggagggaatgagtagtggttataggatgtaagatttgaacggagggttggagtggtggttgtagtgtgtgagtagtggttggagggtgtgagtggtcgttggagggagtgatttttgattggagggattgagtagtgatcggagggtgtgattggtggttagaaggagttggcggtggttggagggtgtgagcggtgttcggagggagtggatggtgtttggagggtgtattattaaggacgtttttttgatcgttttgcgtttatgtttagttttggatttttttttttttttttgggtgtgtgtggttttggaagaagttggttaatttgacgaggttatcgttttattgttattatggaagtatagcgttttagttattttttttggaggagtttggttttatattttaattatttttttttttttttgggttaatttgaggaatgtggtttcgttttatgttgtgggtttgtgttttaagttttttggttaggaaagtatttgttttttttaatatttgaggattttaattttagggttttagttgggtgtttttgtaaagggtttttggggtggtagttgtttttttgattagaggtttggtaggaaacgggttttattatagcggatttgggtaatgcgaggagagtgaagattgtaaaagtttttttgcggttggtaaattttttaggttggggtaggggggtgaggggtttgttttggggtttggggaagatggtgtgtggagaggacgtttatttgggttgtggttgagagggggacgtggtttgttttaggtgattttaggagggattttggaggagagttcggatttatttttttttaaatttttttttttttttagggttatttatagaatttttttttgttaaggtataggttaggggtagcgggtaggtggggagcgttaggaggagattgattttttaattgcgcgttttttttgtggggaatttgggcggttgcggggttttttattgaaaatgaggggttttcgttagatcgtagggaggtcggttgggcgtaggaaataagtaatgtttgtatagttatagacgtttttacggttatagatgtttgtcggagagggtttgaggtgcggagtttttagatgttttgtggtttagttattgcgttttttagataagaaaattaagatttagagttgtgaaaatgttggtatagggttttttattgatgatggattggcgtttgtttttgtattttttttttcgttatattggaattgtttttaataagtttttatggataaggttatgtatggtgtggttttgggtttcgtttatttttatagggataaagtttttgtttcgagaaacggagagtttcgggggtagttttagtcgttttaattttaatgtgggaggttaaatttcggtatttggtagttattttatagtttttttaaggagataggagttgggttttttaagaaagtaattgtaaatatgtatagaatgttagaataatattcgtgaatttacgttgttttttattaatggatgttaatttttttattttattttttttagattttttttaataaaagaaaatattacggagatatcgaaggtttttttgcgttttatttcgttatttttttttgtttttttttttttagatagatttattatgttgaagttagtgtttcgtttttgtttatattgttattattttgtttatttggatgtagttttaatagtatattatattgttttatatagtttggaaatttatattataaatgatattttattttataaattattttaacggatttttttatttcgttttgtttttaatattttttattatttatttatttttattttttgaaagatatttatatatatatatatataatatatgtaaagtataatatatgtatgtaattagttttttatatttatgggttttatatttatggattttagtaatgttagattaaaattgttttaaaatttagttgggtatagtggtttatatttgtaattttagtattttgggaggttgaggcgggtgtattatttgaggttaggagttcgagattagtttggttaatatggtgaagttttgtttttattaaaaatataaaaattagttgggcgtggtggtatatgtttgtaattttagttatttaggaggttgaggtaggagaattatttaaatttgggaggtggaggttgtagtaagttgagattatgttatcgtattttagtttgggcgatagagtaagattttgttttaaaaaaaaaaagtattttaaaattttatttataatattttaaagattaaaatttgggtgtgtcgtaagttaagtattatgtagaatttgtagaatgaaatgaggtgtaggtattgtattaggtattataattaatttagagatggttaaagtgtaggagaggatgtacgtggtttttgcgtattatgttattttatattagggatttgagtatttgtggattttggtatttttgggtggggggttttgaaattagttttttaggggtattaagggacgattgtattgtattttaagtttattttttttttttttggttaatgaatatttattttgttttttttttttttttttttttttttttttttttttttgtttttagttgttataaataatgttaaaaagaatatttttgtttgtgtttttttttgtttaagtatgaatatgtttttgggattaagagattaggtttggaaatagaagaatttgttgagttgtaaaatttgtatggtttaaattttatcgaatattgtttattttttttttaaatgattgtgtaatttatattttatttttaagagtttttattttgattcgagaaattagagtagcgaaaattatcgttattatgagtattattttgggtttggtgttttcgttttgtttttaataaatttaagttgattatagaggatattaggtttcggtttttttttgggttttgcggttaggttttttttggagattttggtttaggagtggagatttcggtgtaggagtggtagttttggaggaggggttgggttttgggatggagcgaagaggaatatggtcgtttttattttggtttaggttttttttttagaggggttgtagaaatgtattgattaggttatttaagaaaagatagtatttttgttaggttagtatgtattttttttagggtttaattttttattgaagaagaaaagattttttttgttgtttatttttttatgtagttttttaatagttgtttttcgaatgttaattaaagttattgttttagggtttggggttattttaaggtattaggagatgaggatttttgtttttatgcgttttttcgtttgttgtagggaggagtgtaatgaataaataattaatataatgtgttagttatttgttttatttattaggaggtaataagagttatgaaagagaaagtttcgagtaggggaggggagtgaggtatggtataggagagtaggaggttgttttttaaaatataggagtttaggggattaattgggaaggtgtgggagggggagggagggagttttatagatataggggagtgaattacgtttattttgttagtttttgatggtagttcgtatatattattttttttttttttttgtttttagttttttttagaaggagatttaatttgtcgtttaggttggagtgtagtagggtgatttcgatttattgtaattttcgttttttaggtttaagtgatttttttgatttaatttttagagtagttaggattataggtattcgttattatgtttggttaatttttgtattttttttttttgtagagacggggtttcgttatgttggttaggttagttttaaatttttgattttaagtgattcgtttgttttggttttttaaagtgttgggattataggcgtgagttattgcgttaggtttataattttattattaaaataattttattgtaaaagaattagtttaggtttagacggaatgggttttatgagtttttttttttttttttgtaaggttacggtggttatttcgtgagttattgttgttacggttaagttttttttcggttattttttattatgaattatttttgtagtgagtatagtatttattttggcgggagggttttttagatatgagtaggatttggattaaggttaggttggaggagatttttatgggaaagagggattttttgaattttagattttttagttaagatgattttattatatgtcgtttttgtttattagtaaatttttttatgtagtttgattatgtttaggaaatatttttgataaaaattagtggagattattgttttagaggattttcgggtttttttaggtaaatgttatttaacgttttttaagtaaatagagtttgttttataaaattcggggttcgggcggttttttatttttgattcggggtcgtttttggagtagagaggaggtaatggttattatggagaataaggtgatttgcgttttggttttggtgtttatgttggttttcggtattttggtcgaggtttagataggtaaggcgtgtttttttttgttttgtggggttatagttagttttggtagttttcgttaggagttattgttttatatatatatttttgagtatttgttttgtgttaggtgttgttttaggtttttaaaagtatatttaatttataggatcggtaaaagtaggtggagagtaatttagggtggtagggttttcggagattttcgagaagtgcgacgaggagggggttgtttttagtcggggttgtttttttgtgttaggaagattatataatttttttaagtgttatgttttaaagaggaagtgttggcgtggggttttagaatagtgtttttgattgtttatgttaatattttttttaggggtagatttttttaaggtttatttagataggtttaaatgtcggttttagtgatggttatttgggagatttttttttataggttcgaatgttcgttttagtggtggttaattgggagatttttttttataggtttttgggtttttttgggatttatgttttgggagttaaagttattttttttatgagtgcgtggttggtaatttatattttttggtgttgttaagtggatcggttgttttgggtttttttagggagtggaggaggaggttatttttgtttttttgggaagtgtttgtattttaatttttttatttgtagaatggattaacggtttgttttagggttgttaggaaatgttgtgtggtagtatttgcgatttgtattttgttagttgtggggagttgaataatttatttgtcgttattaggtatagttttaaggtgggggtaggagaaagggttttttacgtttttaaagtaagggtttttagagaggtttgaagagggagcgtttagtggtgttgttcgtgtttttattgttttttagttattttttgatttttgttgtggggtatcgggtttgaggggtgggtttgggtagcgtagaagagtagttagtattgggttgtagtgggaagatttttaagtttatggtagggagcgggggagttttggaattcgagagaggaagtggtttcggtgtatagaacgaattgggtgggttttcgtgttggttatttttaggtttatttgtttgcgtttttgtttttattttagtttttagttttgttttttgtgttgtgggattatagaggtcgtggtaaatttttttttttattttatatattttttggtttaaggtttagagcgtttttgcgggttatttaggtttatgattttgttataattgaaatttagaaaattgtgattatagtttagtgtattcgtgtgtggaaattatttttatttatttttattatgcgataaagataaagcgggtgggtaagatagagtttgtcggaggtagagtatcggggttggaaatttttttttttgaggaggaaattttttcgatttttaggatgatgatttttttttattacggggttttttttgatttttatagtgtttcgggggtgggcgatgattatttttacgtcgcgatggatttagattttaggagggtaaggtttttatggaagttgttgggtagcgggagttgaatacggattttttttagtaagttaggaatattttttttaaagatatttcgaggtagtttttgatagtaaagtagataagagaatagtttttttcggttttttttggggcgtttttatttgagttagtgtggttagattgagtttttttttttttatgttttaaggtagggatagggatcggagggtgttttgggttttttttttattttttgttgtaggttgttaattattagattttaataggttgttttttgagatttttgatttcgcggagtttagagtttgaagttttggtgttagaattttttgtataagattttgcggtagtttttagttagttttatttgtttacgtgttttttttttttagatttttttttttattgttttgttttaagttgttttatagtttgtattttttgtcggttttttttagattattttattcggtttttttattttatttgtaatgggtttttattttttgaatatatttgggtttttggaatggtttttgtttatgcggttttatttttatttggtgaatttttttttgtagggagtttttttgttttgtttaatttgtttgttattggttttttcggggagtgttttattttcgtggttattttgggtattttgggacgatggttttgcgttgtttcgtatatgtttttgttttttttttttattagatttttagatttttttttttttttttttgagatggagttttgttttgttatttaggttggagtgtaatggtgcgattttggtttattataatttttgttttttgggtttaagtgatttttttgttttagttttttaagtagttgggattatagacgtgtgttataatgttcgtttaattttttgtatttttagtagagatggggttttattattttggttaggttggttttgaatttttgattttaagtgatttattttttttagttttttaaagtgttgggattataggtatgagtttgggtttagatatttagatttttattaatgatttttttggttttaatttttgggttttttttatttggtatagtgtttggtttttgttatgttagtttttattttttatgtatataaatggtgtttagtaaatatttatgtattgagtaaaatttaataattatttgttgaaattaaaaagtgaataaataagttatttagaaagatgtaaagtttataaatttggggtattttgtattttttttgagcgtaatgtttgtatattaggatgtgaggattacgttttttttttatgttttgagggttttatattcgttttattggatagttgttgatgttattggagaaggaagttggatgggtgtgtgtatgataatattaaggaatttagtttataatttattttgttttttatttgtgtatttttaga

SEQ ID NO: 490 - DNA, 8129 bp, Artificial Sequence
  chemically treated genomic DNA (Homo sapiens)
tttgaaagtgtataggtaagaagtaaagtaagttgtgggttgaattttttgatgttattatgtatatatttatttagtttttttttttaatgatattagtaattgtttagtgaggcggatataaaatttttaggatatgagagggagacgtggtttttatattttgatgtgtaaatattacgtttagggaaaatgtaaggtgttttaggtttgtggattttgtatttttttaggtaatttatttatttattttttaattttaataaatgattattaaattttatttaatatataaatatttattgagtattatttgtgtgtatgagaagtgggagttagtatggtaaaagttaggtattgtgttaggtgagagagatttagaaattaaaattagagaagttattaataagagtttaaatatttgggtttaggtttatgtttgtaattttagtattttgggaggttgaaggaggtgaattatttgaggttaggagtttaagattagtttgattaaaatggtgaagttttatttttattaaaaatataaaaaattaggcgggtattgtggtatacgtttgtaattttagttatttgggaggttgaggtaggagaattatttgaatttaggaggtagaggttgtagtgagttaagatcgtattattgtattttagtttgagtgatagagtaagattttattttaaaaaaaaaaaaaaaagagtttaaggatttgatggaggagaaaggtaagaatatgtgcgagataacgtaaggttatcgttttagggtgtttagggtaattacgggggtagggtatttttcggagaggttaatgataagtaggttgaataaagtaggggggttttttgtaggaggaggtttattaggtgaagatggagtcgtatgggtaaaggttattttagagatttaggtgtgtttaggaggtggaaatttattgtaggtaaggtgagaggatcgggtggggtggtttaggaggagtcgatagagggtataagttgtgaaatagtttgaagtagggtagtgaggaaagggatttagaggaggaagatacgtggatagatggggttggttgggggttgtcgtaggattttatgtaagaggttttaatattagagttttaggttttgagtttcgcggaattaaaggttttagaaagtaatttattaggatttggtggttgatagtttgtagtagggggtgaaagaggagtttagagtatttttcggtttttgtttttgttttggggtataggaggggaggaatttagtttggttatattggtttaggtgagggcgttttaggggaggtcgagaggggttgtttttttgtttgttttgttattagggattgtttcgagatgtttttggagaaagtgtttttggtttgttgggaaggattcgtgtttagttttcgttgtttagtagtttttatgggaattttgtttttttggggtttggatttatcgcgacgtgaaggtgattatcgtttattttcgggatattgtgggggttaagagaggtttcgtggtgagggaggattattattttgggggtcgggggggttttttttttagggaggaagatttttagtttcggtgttttgttttcggtagattttgttttgtttattcgttttgtttttgtcgtatgatggaaataaatggaaatggtttttatatacgaatgtattaaattgtaattataattttttagattttagttgtaataggattatggatttgagtgattcgtaaagacgttttgagttttgagttagagggtgtgtggggtggggaggggagtttgttacggtttttgtgattttatagtatagggggtagagttgggggttggggtgggggtaagggcgtaggtagatgggtttgggggtggttagtacggggatttatttagttcgttttgtatatcgaggttattttttttttcgggttttaaagttttttcgttttttgttatgggtttgggggtttttttattgtagtttaatgttggttgtttttttacgttgtttaagtttattttttaggttcggtattttatagtagagattaagaggtggttggagggtagtgggggtacggatagtattattgggcgttttttttttaggtttttttggaaatttttgttttggaaacgtagaaagtttttttttttgtttttattttgaaattgtatttaataacggtaaataagttatttagttttttatagttggtaaagtgtaagtcgtagatgttgttatatagtattttttgatagttttagggtagatcgttgatttattttgtaggtaaaggagttgagatgtaaatattttttaaggaagtaagaatggtttttttttttattttttagaaggatttagggtaatcgatttatttgataatattagggaatatgggttgttagttacgtatttatgagagaggtggttttgatttttagagtatggattttaggggagtttaggaatttgtaggagagggttttttagttggttattattgggacgggtattcgggtttgtgggagagggttttttaggtggttattattgggatcggtatttgggtttatttggatgggttttgggagggtttgtttttgggggagatgttggtatgaatagttaaaagtattattttgagattttacgttaatattttttttttgaaatatgatatttgggaggattgtatagtttttttaatataggaaaatagtttcgattgaaggtagtttttttttcgtcgtatttttcgaaggttttcgggggttttgttattttgagttattttttatttgtttttgtcgattttgtaaattggatatatttttaagggtttagaatagtatttggtataaaataggtgtttaaaaatatgtatgtaaaatagtggtttttggcggaggttgttagagttggttgtggttttatagagtaggaagaagtacgttttatttgtttgggtttcggttagggtgtcgagggttagtatggatattaggattagggcgtagattattttgttttttatggtggttattgttttttttttgttttaaaggcgatttcgagttagggatgagaggtcgttcgagtttcggattttatagggtaggttttgtttgtttaaagagcgttagataatatttgtttaaggaggttcggggattttttgagataataatttttattgatttttattaaaggtgttttttagatatggttaagttatatggaaggatttgttgatagatagagacgatatgtggtgaggttattttggttgagggatttgagatttagaaagttttttttttttatgggagttttttttaatttgattttaatttaggttttatttatatttgagaggttttttcgttagggtaaatattgtatttattgtagaagtgatttatagtgagagatggtcggaaaaaggtttggtcgtgataatagtggtttacggggtggttatcgtgattttgtagggggaagggaaggagtttatgaagtttatttcgtttaggtttaagttaatttttttatagtggaattgttttaataatgaaattgtaggtttggcgtagtggtttacgtttgtaattttaatattttgggaggttaaagtaggcggattatttaaagttaggagtttgagattagtttggttaatatggcgaaatttcgtttttataaaaaaaaaaaatataaaaattagttaggtatggtggcgggtgtttgtaattttagttattttggaggttaagttaggagaattatttgaatttgggaggcggaggttgtagtgagtcgagattattttattgtattttagtttgagcgatagattaagtttttttttgggaggggttgggggtaggagggagaaaaaaatagtatatacgagttgttattaaaaattgataaagtgaacgtggtttatttttttgtgtttatggggtttttttttttttttttttatatttttttagttggttttttggatttttgtattttagaggatagttttttgtttttttgtattatgttttattttttttttttgttcggagtttttttttttatagtttttattattttttggtggataaaataagtgattgatatattatgttggttatttatttattgtatttttttttgtagtagacgggagggcgtatgggagtagaagtttttattttttagtgttttgaggtggttttagattttagaatagtggttttgattggtattcgagaaatagttgttgaagagttgtatgaagaaatggataataggagaaatttttttttttttagtgagaaattaggttttgaggaaaatgtatgttagtttaataaaggtattatttttttttgggtgatttagttagtatatttttgtagtttttttgggaggggagtttgggttagaatgggggcggttatgttttttttcgttttattttaggatttagttttttttttagggttgttatttttgtatcggggtttttatttttgggttagggtttttaggaggggtttgatcgtaggatttagggaggggtcgaggtttggtgttttttgtggttagtttaagtttattgaaaataggacgggggtattaggtttagggtggtgtttatagtgacggtggttttcgttgttttaatttttcggattaaaatgggggtttttggaaatgggatgtaaattgtataattatttggagaaaaggtgggtagtgttcggtgaggtttaagttatatagattttatagtttagtaaatttttttgtttttaggtttggttttttaattttagaaatatgtttatatttgggtagaagaaaatataggtaaagatattttttttagtattgtttgtaatagttggaaatagggaaagaaggaaggaaggaaaggagggaaagaaaagtaaaataaatatttattaattagggaaagggaaaatgaatttaaaatataatgtagtcgttttttagtatttttgggggattggttttaggattttttatttagggatgttaaaatttataaatgtttaagtttttggtataaaatgatatagtgcgtagaaattacgtgtatttttttttatattttaattatttttaggttagttataatatttgatgtaatatttatattttattttattttgtagattttatatagtatttgatttgcggtatatttaagttttgatttttaagatgttgtaaataagattttaaaatattttttttttttgagatagagttttgttttgtcgtttaggttggagtgcggtggtatgattttagtttattgtaatttttattttttaggtttaagtgatttttttgttttagttttttgagtagttgggattataggtatgtgttattacgtttagttaatttttgtgtttttagtagagatagggttttattatgttggttaggttggtttcgaatttttgattttaggtgatgtattcgttttagttttttaaagtgttgggattataagtgtgagttattgtgtttagttggattttaaaatagttttgatttgatattattggaatttatggatgtagaatttatgaatatagagaattaattgtatatatgtattatattttatatatattatatatgtatgtatgtgagtattttttagaagatgaaaatgaataaataatgagaaatattgaaaataaagcgaagtgaaaaaattcgttaaaatggtttgtaaagtaggatattatttataatgtagatttttaaattatgtgaaataatgtgatatattgttggaattgtatttagatgaataaaatgatgatagtgtagataggaacgagatattgattttagtatgatgggtttgtttaggaaggaggaagtaggaaaaggtggcggggtagggcgtaaaggggttttcgatgttttcgtaatgtttttttttgttgaagaaaatttgagggaaataaggtaaaaaggttagtatttattaatgaggggtagcgtagatttacggatgttgttttagtattttgtatatgtttgtaattgtttttttggaaagtttagtttttatttttttgggagagttgtgagataattattaagtgtcggagtttggttttttatattagggttggagcggttggagttgttttcgggatttttcgtttttcgggataagagttttatttttgtgagagtgggcggaatttaagattatattatatataattttatttataaaaatttgttgaagataattttagtgtggcgagggagagaatgtagaggtaagcgttagtttattattagtgggggattttgtgttagtatttttatagttttgggttttagtttttttatttgaaagacgtagtggttgggttataggatatttgaagatttcgtattttagatttttttcggtaggtatttatggtcgtgggggcgtttgtggttgtgtaggtattgtttgttttttgcgtttagtcgatttttttgcggtttggcgagagttttttatttttagtggggggtttcgtagtcgtttagattttttataagggggacgcgtagttggggagttagtttttttttgacgttttttatttgttcgttgtttttgatttgtgttttggtaggagggggttttgtaggtggttttggagggagggaggagtttgggaggaagtggattcgggtttttttttaggattttttttgggattatttgggataggttacgttttttttttagttatagtttaggtgggcgttttttttatatattattttttttaggttttagagtagattttttatttttttgttttagtttggggggtttattagtcgtaaggagatttttatagtttttatttttttcgtattgtttagattcgttgtggtgaagttcgttttttgttaggtttttggttaaaaaagtaattgttattttagggattttttataaggatatttagttgaggttttggggttggggtttttaggtattggaggaggtaggtatttttttggttagggaatttgaggtatagatttatagtatggagcgggattatattttttaaattaatttagaaggagaggggaatgattggagtgtgaggttaggtttttttagggagagtggttgaggcgttatgtttttatggtgatagtagggcggtaatttcgttaggttagttagttttttttagagttatatatatttagaaagggaagaggagatttaggattgagtatggacgtaggacgattagaaaggcgtttttggtggtatattttttagatattatttatttttttcggatatcgtttatattttttagttatcgttaattttttttggttattaattatatttttcggttattgtttagtttttttagttagggattattttttttaacgattatttatattttttagttattgtttatatattatagttattattttaatttttcgtttaggttttatattttgtggttattgtttattttttttagttattatttatattttttagttattgtttatattttttagttatcgtttaaatttttcgtttaggttttatatttgattattgtttatttttttcggttatagtttatattttttagttattatttatattttttggttattatttatttttttaagttatcgtttattttttttgattattttttatattatttggttattgtttatatttttttgttattggttattttttttagttagagtttatttttttcggttatatttttcgggtgttatttaaaattttcggttatggtttatatcgtttagttatcgtttatattatttagttattatttatgttttttggttatcgtgtattttttttgattattatttatatttttcggttattgtttatatattattgttattattgagattttttatttaggttttatattttttagttattatttatttttttcggatattatttatatattgtggttattatttagatttt

SEQ ID NO: 491 - DNA, 5928 bp, Artificial Sequence
  chemically treated genomic DNA (Homo sapiens)
ttgagtaaataatattgtgttattagttattattgttattatgtttttttttatgttgtatgtttttgttttagtttattttttgttgttaagttgaaattggttatttataagaaatgaattttattttttatagttttggagattgggatgtttaaggttgaggggttgtattttttgagcgtttttttgttggtggggatttttagatgtgttttaaggtagtttagggtattttatggtgagggcgttgagtgtgtttatgttttagtataggtttttttttttataaagttattaggtttttttttataataatttatgaatttattattttatgaatttattaatttatgagtggattaatttatttatgagagtagagtttttacgatttaattatttgttaaaggttttattttttaatacggttatattggggattaagtttcgatatgagtttggagggatatttaaattatagaagtttttttttttagttgttttaagagttttttaaattatcggatttttaatagacgaattatgttgtgttttgatgtgatatttttggtatttattttttttgaagttttttgagtttttaagatttgtaggtttatattttttattaattttagaaaaatttaatgaatatttatttaatatttatttttgattaagtatttttttaaaagatttttttttttttttttttattggtatattaattatatgtatgttagattgtttgatattgttttatcggttattggaattttgtttatttgtttagtttttttttattttatgttttagttcgtatagtttattttgtattggttttattttaagtaaattgattatttttttgtagtatttaatagtatttaattaaaaatttatatagtgtattttttattttagatgttgtattttttatttttaaaatttgtatttggttaatttttagtttttatttatttattgagatttttttttgtttttttattatattatgttttttttttaatttttgaatattttatgttatgtttaagtttgtttttgtttattgatttttttaatgattatgggttatattttttagttttttttatatatttagtaatttttgattttttgttagacgttagggatgttatgttgtgtatttaggttttgttgtttttattagtaaagtgttgaatgttttgtttttttaggtagtgttatcggttgaattattttttttaaatttatatatgaagttttaaattttattatttaagaatgtgattatatttggagatagtgttttaaaaggggtaattaggttaaaatgaggtttttagggtgggttttggtttaatttgattggtgtttttataagaaaagagtcgttagagatgtgcgtgtatagaggaaagattatgtgagatatggggaaaaaaagttatttgtaagtagaaagaggttttagtagaaattagatgtgttgatattttattttggatttttgggtattagaattgtgagaaagtatatttttgttggttaagttatataatgtgtagtattttgttatagtaatttgagtgaattaatataagtagttaatttatttgtaggttaatttgatttttgtaagatttgttttaaagttttgttcgaatggattttgagtagtttttttttagaaagattagttttttttttacggtatggtttttattgaatgtttgaagtggttaatatttttggttgttttgagtttaaatgttttttagttttacgaattttatattagttgtttagtttagtttttttagtgattgttttgtttttaggggttatttagtttggttttgtgggtacgaatagtatagtatttgatgaaaagtttaaaggatatatttttatatttttggagttttttttttttattttgataattcgtttgttttagaagtttttaattttgatttttgtttttttagttcgatgggattttagtgttatttgggtttttttttttgtgttgtagtttggagagcgtttttaggaaattaaggtagttatgggattttttttattgtttttttttttttagggatcgttgtttggtattgtttgttgtttagtatttgtagattgttatttatgtagttttagagttatttatggtgggaggttagtttggtattagtgattttatagttaaaagcggaagtttatatgggtgatagttgaggtggtttttatttgttgattttttatgtgaattgatggaaagtattatttttaaagtgtgtaaaatggaagtgagtaggggtggagaaggataaatagaaagaggagggcgttagttttgagtgtttggatggcgttgagattatgcgttgagagtggtaataatttaaggtaggtgtcggttatgttaggtagatggtataggtatagagatagtgggaaatagtagtgaggaagacggtgggtgaagtgagtattgtggaaattaggttggagaagtaggaaggaaggatagataggagggggtttataggggaataggggattggagggttttaggatttagataaagggagaatgttaggagtttaggatattttgggtagaaaggatatttgtatatttttttttagaggtggagtttaagttttgagtgtggttatgggagggtggtagaagtggtagaagtggagtggagatggaagtttttagagatgaggaaaaataaaatttgagcgattgtgaattttgatgaaatatcgatcgttatgttgaagatggttgggatgtggttaagttttagtatgataaggaatatagtgaatttagtgttgaaatttttaacgaaagggataggttgtataaaggtcggtagatgatagtagggtagggatttcggatatggcgttttttttagtttgtatttttaaggaggatggtttttgtatgagggtgaagatttggggtttaaagttaatgtttagtttttagtttgagtttatgtgatggggacgtggttattaagtatagttgtggaggttgtgaatagttttatttttaattagcgatgttattttattgtagacgttttatttcgtgtaatggttttttaattttgtgggtatttagtgtttttgcgtgggggtttgagtaggattttagggaagtatgtttatgataatataggttttcgttagggttaggagagtgagagaggttgagaagtggttttttttgtatgggttaggtggtcgtagtaggaattttgaaggggttgtagtgagcggtgggaagtcgagttgatggggaggaagtagagaggagaggtgggtgggaatatgagagaaaataatgatttagttatttatattatgatggtgattaaagtgatagggatgtagaataaggaaattgattttgttagagtttttatggatcgagtttttgtggttgtttagtggtgaatagttagtagagagtttggaggtatttgattcggatttagaggagttttggaggatggagtttggaggacgggggtttggagaatgagggtttggaggacgagggtttggaggaataggggtttggaggacgagggtttggaggaagagggtttggaggataggggtttgaaagatgggggtttggaggatgagggtttggaggatgagggtttggaggagtaggggtttggaggatgagggtttggaggataagagtttggaggataggggtttgaaagatgggggtttggaggatggggtttggaggatgggggtttggaggacgggggtttggaggatgatggtttgaaggatgaaatttggaggatggagtttggaggatggagtttggaggatgagggtttagaggatgggggtttggaggataggggtttagaggatggagttttggagaatgggggtttggaggatggagtttgggggacgagggtttggaggatgggggtttggagtatggggtttgttttttagattttgaggatagtttcgtggtggattaaggattttgggttttttgcgtttttgggtttttgattgtttaattattagaaatagattggtaattttttgttatttttttggcgtggggaatttcgggttttttttgttttttttattatattttttttttttttttttcgggtgtttattttttggtttttgttttttttgttaggtttatagaatttttttttagtatattttattttaggaaggttatgggttgggttttaggtgttattttttagaagatgtagagtatttttatggaataaaaataatttattttaggggttggttgaaaatgaatttattaaaatttgtttgttataggttatttcgttgattttgttagttttatttttatggagagtagttttttttgttgaagatgggataaagggtatcgtgttgcggttggggaggttttaattatagttttgggagtagttttttattttttttgagatgttttttttttttagggaggggatttttttatgttatttgttggtttgtatattttttttagtaaatttggttttaatattttttaaatttttgtggtttttgtttattttattaatagaaatgtatagtttatttttttttgggtgtgattttgtgtgtgtttagttttagatttgtacgtggtcggttttttacgttggtagtttggtatgatttaattttttgtttagggtaggaagaggtattatcgagtagggagagagttattttggttcggaagtttcgtttgtatagggtatagttgttttttgtttttttttcgtttttacggtggaagggttggggttacggggtagagaagaaaggttatttttgtttgttggataaatagaggggagattataaaatatattcggtagtggatattatgtattttgtaagttattttggggtgtagttgagttagatatgggacggcgagacgtttagtttttggtagcgtttttcgttttggggttatgtgttttggcggggagtgagaaattttgtaagtgaaggagagggtttttttatgtgttttttttattttttttaaagaaaaaaaaaaagtataattataaattaatttgagagggggaatggttataaaggtatttggtaatgtgtgttgtttatatgggatttgttattgtttaggagggtggttttaagaagggttttttttttagggaaaggttgagtgacggtaggtgttagcgggtttcgtgtcgggttaggagggtatttttattaagggtttttggagttttagagtatttatttttcgtttggattttggttttgggtttatttgtttatttttttttaggagggttttgtttttgttttttttcgagataggatttggttttgtcgtttaggtaggagtgtagtggtgtgattttggtttattgtaatttttgttttttaggtttaagtgatttttttattttagtcgtttgagtagttgaaattatagttgtggattattatgttcggttaatttttttttttgtattgtttgtagagatggggtttcgatatgttgtttaggatggttttgaatttttgagtttaagtaatttgttcgtttcggttttttaaagtgttgggattataggtatgagttattatgtttggtttttttttttttttttttttaaattaatataataattttagtaaagttttatcggttttttaggaggaaatcgtattgtttaaatatgggtaagataagattttgtgtttttttatgtggtaataagatagtagaggtattttttagaatttttgagagaaggagtagtgtggtttggggtattagggtggggtcgattgagggtttttttatagt

SEQ ID NO: 492 - DNA, 5928 bp, Artificial Sequence
  chemically treated genomic DNA (Homo sapiens)
gttgtggaaagatttttagtcggttttattttggtattttagattatattgtttttttttttagaggttttaggggatgtttttattgttttgttgttatatagagaaatataaagttttattttgtttatatttaagtaatgcggtttttttttgagaagtcgatagggttttgttgaaattgttatattagtttaaaaggaaaaaaaaaaaaaagttaggtatggtggtttatatttataattttagtattttaggaagtcgaggcgggtagattgtttgagtttaggagtttaagattattttgggtaatatgtcgaaattttatttttataaataatataaaaaaaaaaattggtcgggtatgatggtttataattgtggttttagttatttaggcggttgaggtgggaggattatttgagtttgggaggtagaggttgtagtgagttaagattatattattgtatttttgtttgggcggtaaagttagattttgtttcggaaaaaaataaaaataaaatttttttagaggagggtgaatagatggatttaaggttaagatttaggcgagaggtgagtgttttgggattttaaggatttttggtgggaatgtttttttggttcgatacggggttcgttgatatttgtcgttatttagtttttttttaggagggaggttttttttggagttatttttttgagtagtggtaaattttatgtgaataatatatattgttagatgtttttatagttatttttttttttaagttaatttatggttgtgttttttttttttttttaagagaaataaagaaagtatataaaaagatttttttttttatttatagggttttttatttttcgttagggtatatagttttaggacgaggagcgttgttaggagttgggcgtttcgtcgttttatgtttagtttagttgtattttagggtggtttgtagaatgtatggtgtttattgtcgggtatgttttataattttttttttgtttgtttaataagtagagataattttttttttttgtttcgtggttttagtttttttatcgtggaggcgaagaggaggtaagaggtagttgtgttttgtgtaggcgaggttttcgggttagggtgattttttttttgttcggtgatatttttttttgttttggatagagagttgggttatgttaggttgttagcgtggaaaatcggttacgtgtaggtttggggttgggtatatatagggttatatttaggaagggataagttatgtatttttattgatagagtgggtagggattataggaatttagaaaatattagggttaagtttattggggaaaatgtataggttagtagatagtatggaaaagttttttttttgaggaagggaagtattttagaggaggtaagagattgtttttagggttgtggttagagtttttttaatcgtagtacgatgttttttgttttatttttagtaggaggggttgttttttatggagatgaggttgatagggttagcggagtagtttgtgataggtaggttttaataagtttatttttagttaatttttgaaatgggttatttttgttttatgggaatgttttatattttttgaaagatggtatttgggatttagtttatggtttttttggggtaggatgtgttggagaaggattttgtggatttgatagagaagatagaagttagagagtagatattcggaaagaaagagggaaaagtgtggtgggaaggatagaggggattcgaagttttttacgttagggaaatgatagggggttgttagtttgtttttgatggttgagtagttaggggtttagagacgtaggaaatttaaaatttttggtttattacggggttgtttttagggtttggagagtaggttttatattttaggtttttattttttaggttttcgttttttaggttttattttttaggtttttattttttagggttttattttttaggtttttgttttttaggtttttattttttaggtttttattttttaggttttattttttaggttttattttttaggttttattttttaggttattattttttaggttttcgttttttaggtttttattttttaggttttattttttaggtttttattttttaggtttttgttttttaggtttttgttttttaggtttttattttttaggtttttgtttttttagatttttattttttagatttttattttttaggtttttattttttaggtttttgttttttaggttttttttttttagattttcgttttttaggtttttgtttttttagattttcgttttttagatttttattttttaggttttcgttttttaggttttattttttagggtttttttgggttcgggttaagtatttttaggttttttgttgattgtttattattgggtaattatagggattcgatttatgaaaattttggtaaggttagtttttttgttttatatttttgttattttagttattattatgatataagtgattgagttattgtttttttttatatttttatttattttttttttttgttttttttttattaattcgattttttatcgtttattgtagtttttttaggatttttgttgcgattatttgatttatgtaaaagagattattttttagttttttttatttttttggttttggcggaagtttgtgttgttataggtatgtttttttggaattttgtttaggtttttacgtagggatattgagtgtttatagagttgggaaattattatacgagatgggacgtttgtaatagagtggtatcgttagttgaaagtggagttgtttataatttttataattgtatttggtggttacgtttttattatatgggtttagattgggggttggatattgattttgagttttaagtttttatttttatgtaaaaattattttttttggagatgtaggttgggaagggcgttatgttcggagtttttgttttgttgttatttgtcgatttttgtgtagtttgtttttttcgttaagaattttagtattgagtttattgtgttttttgttatgttaagatttggttatattttagttatttttaatatggcggtcgatgttttattaaaatttatagtcgtttagattttatttttttttatttttaggaatttttatttttattttatttttgttatttttgttatttttttatgattatatttagaatttgagttttatttttgaaagagggtatgtaaatgttttttttgtttaggatgttttaagtttttaatattttttttttgtttgaattttaaagttttttaattttttatttttttgtgagtttttttttgtttattttttttttttgtttttttagtttgatttttatagtgtttattttatttatcgttttttttattgttgttttttattgtttttgtgtttatgttatttgtttagtatggtcgatatttattttgaattgttgttatttttaacgtatgattttagcgttatttaggtatttagggttggcgtttttttttttttgtttatttttttttatttttgtttatttttattttgtatattttggggatgatattttttattagtttatatagaaagttaataaatgggaattattttagttattatttatgtggattttcgtttttgattatggagttattggtattaggttagttttttattatgagtaattttaaaattatataagtaatagtttgtagatgttgagtagtaggtagtgttagatagcgatttttgagagaagggaaataatagggggagttttatggttgttttggttttttggagacgttttttagattatagtatagggaggggaatttaaatagtattgaagttttatcgggttgaggagatagaggttagaattggaagtttttgaggtaggcgggttattaaggtaagagaaggaagttttagaaatataaaagtgtgttttttgagttttttattaaatattatgttgttcgtgtttataaggttaggttaagtagtttttggggatagaataattattggggaggttaaattgaataattagtgtagggttcgtggggttggaaagtatttgagtttagagtagttagaggtgttgattattttaagtatttaataaaggttatgtcgtaaaaagaaggttgatttttttagaggaaagttatttaaaatttattcgaataaaattttaaaataagttttgtaggaattaagttaatttgtaagtaaattaattgtttgtattagtttatttaggttgttgtaataaaatattatatattgtgtagtttaattaatagaagtgtatttttttataattttggtgtttagaagtttaagatagggtgttagtatatttggtttttattgaggtttttttttgtttgtagatggttttttttttttatattttatatggttttttttttgtgtacgtatatttttggcgattttttttttataaggatattagttaaattgaattagggtttattttaagagttttattttaatttgattattttttttaagatattgtttttaaatgtagttatatttttaggtaatggaatttaaggttttatatatgaatttgggggaaataatttaatcgataatattatttgagagagtaaagtatttaatattttattaatgaagatagtaaaatttaaatatataatataatatttttaacgtttaatagaaaattagaagttattagatgtgtggagagaattaggaaatatggtttataattattagaaaaattagtgaataaaaatagatttagatatggtataaaatgtttaaagattgaaagaaaaatataatataataaaggaataaaaaggaattttagtagataaatggaaattaaaaattaattaggtataaattttagaaataaaaaatataatatttgaaatgaaaaatatattgtatgggtttttgattagatattattagatgttgtagaggaatggttagtttatttgaagtgaagttagtgtaagataaattatgcgaattagagtataaagtgaaaaagggttaaataaataaataagattttaatgatcggtgagataatgttaagtaatttaatatatatgtaattgatgtattagtaggagaggagagaaaaaaattttttaaagaaatatttgattaagaatgagtattgagtaaatatttattagatttttttgaagttggtgaaaagtataaatttataaattttagaggtttaaagaattttaaggaagataaatattaaaaatattatattaaggtatagtatgattcgtttgttgaaaattcggtgatttaaaaaatttttaaagtagttggaggaaaagatttttataatttgaatgtttttttaaatttatgtcgaaatttaatttttaatgtggtcgtattgagaggtggggtttttaataggtgattggatcgtgagagttttgtttttatgaatgaattaatttatttatgaattaatggatttatgggatgatggatttatgggttattgtggaaggggatttggtggttttataagaagagagatttgtgttaggatatgaatatatttagcgtttttattatggaatattttgggttgttttgggatatatttgagagtttttattagtaagaaggcgtttaagagatataattttttaattttggatattttagtttttagaattgtaagagatgaagtttattttttataaatgattagttttaatttagtaatagaaaataggttaagataaagatatatagtatggaggagaatataataataataatgattgataatatagtattatttatttaa

SEQ ID NO: 493 - DNA, 5680 bp, Artificial Sequence
  chemically treated genomic DNA (Homo sapiens)
ggtttgtgttttggggagttggggaatgggatagtcgttggttattggttataaatatcgttatttagtatgtgatgttggttttttgttggggaggagtcgtaggttggtttttggtttttttggaagtgtttggttttttgggaattgttttttgtatttgcgagaagagggtaaggattgtttttgttttatgggttttattggttgttattttttgggtttttatgttgttttatttttagaagattttttttgttttgaggattttacgtatgttattattgatttttatgtttgagtttagagaggggaagtgattggtgtagatataagtttaaggtagtagtttcgttttttaatttttagtcggtgttttgggcgggttattgtcgttagtgggggataagggtggtagtttcgttttagttttgtaaagttcgtggagattaggggttgttttcgaggggatagtggggtttaaggtttgataacgtttttttggtagatgtagatttttcgagtaatttttcgatttgtttgggaatgggagggggggtgagggggtggggtgggggaatagagtttggtaggagaggtttgtggggattgtataatgaggttatagtagttagtcgtgaaggtagttatcggttagggttttttagttcgtatttttatcgtttttgtgtggatgaattttatttgcgcggtgtcggtggaaggatttttttagtttcgggatatcgcggttttgtggatttatttgaaaaatgttatttttggagttttaggagagaaggggtggggttggtagttttaacgttttattttgtattttggcggtttttcgtattcgtttttttataggttttttagagataggatgatggatggtaattcgagtgtaaatttggcgtttggttagtattttggaagaggaagtttttagtttttagggtatttgaatttatagtcgtttttatttcgttggtttttttggttttggaagatttgttattaggttgtagaaggggtggcggagtgattagggggcggggaaagaggttaaataaaagaggggaggagtagaggttttagtgaggtaggagggaagtttttgtttagcgggaaatttttaaatgtttgggttttttttagagggtaggaatttttagtttagagtgtgaaataaggaaggaagtgaatttttagtgggttttttttatagtttttttttattttttttatatgttttatttttatattttttaaaataaattttgagagacggtgtggatggggagataggtttggaaacggaggtttgcgttgaatgggtaaagtcgggttgatgatttagacgaggttttggagtttgggttttgggtttttttttttttgtttgtttcggtagtttgtgggtttagttttagttttagagggggaaaggttttagtgggagttttataggtttggttaggaattttatttcgttatttaaagtggtgtgagtcgggttagttattttattttttcgtatttacgtattttaagtaaggtttgacgatcggaggggtttaaggttttgtgtatagtcgcgcggttagtattttggttagttttgtagtttttttttttttagggggttttttttaggaagttttcgttttttgtttttttgtggttacggtgatatcggaatattttagaggggcggttggggagttggggtgggacgggttttttcgtagttggagtcggtgtgtgacgcgggaacgcggttaagcgcgttttatttaggcggtttattaggagtcgtcgtcggataatggtttcgcgtttgataatttcgtcgttttcgtgtcgtttttcgaattttatatattatgcgacgcgcggttagtttttcgtttttgttcggttgttgggaggaagtgatagcgtttcgtatttttcgttgggtaggtcgggcgcgtttagtttttgggacgtagggatatagtcgggtcgcgttgggttttggttttcgttcgcgggtttttcgcggttgcggcggggcggggaaggaggggcgggcggggcggggttgattttgcgattattttaggttttgcggaattcgggttaggatagtggcggttaggtcgggatacggtaagtgattttcgtttttatacgtttatttttcgtcgtttcgcgcggtttttcgttcgtttttatttcgaggttaggtcggatttttcgaggaaagagtttgtcgtcgcggcggggataggagggggttggacgtttttagggaaattgaggttttggcgcgtttagcgttcgcgcgttcgggcgtagaggggttaaggttggttgagggttcgggtttgttagaggtagggagggcggggttggggtaggcgtaggggttttttttttattatagtagaaaggttttaggttcggcgtgatttttcggtcgggcgatataggtcgagttattttttcgttcgtgttcgggtgtttttatcgggggatgggtgcgttttttatattttgtttaggattgaaggagtcgggtttagcgagttttcgggaggtgtgtggatattagttttgacggggaaggcgagttaggttagtggatttgaggagaggtcgggtagtaggaggttggggggcgttgttgagttattggttgtgatttttttacgagttttttagtaggtttttttttgttttagtgggtttaattagcggtaaggtttaaaggaacgttttttttttttttttttttttttggttgtatcggttcgttgttgtttgtaggatagatttaggatataggagatttatttttattgaggtttagttaggcgtttagtatttggttgtgcggtttggttatatttttttagtagtattgtggggtgggggtttttattttttttttaaagacggggaaacggcggtttgtgaaggaaggaggtgtgtagtttatatattagtgagaagtgtgttgagtttatatcgaaagcgtttttttttttatggtattagttgtttcggagagcggagatttggggcgaggtttagggggttgtagtaggatttttaggcgttttgggtttcgtgttatagaggggagaaggcggtgatgttgtgggggttttgcgggagttgtgtttggaggtgggatagagtttagtatatgtggggtgggatagggaaggttgaggtgaggttggtagggagtattgttggtaagggttatttttttttattttaggagaatggtagaggtggggtttgggtatttagggtggggttgagtggttttgttagatagattagttttcgcgggtgttaggtatgtatttgagaggggttgggaagcgaagttggggtatcgggtggggagtagaggtgttttatggttttgtttttggggttttttggagtatgttttttttggttttggagtggaatgtttaatttaaatggtattagggaggttagtgttatttaggagtgtgggattttgtttagggtattgggtgagtatggtaggggttgggggtgggaggagtttaggttttttgttttttaggtggttttggttaagtttttttaggatggggatagggtagtggggttggtggaggtagcggggttatgggaagagtcggatgggtttagtttgagtttttatggttgttgtgtttggggtaaatattttttatttagttttagtttttttttttggatggtggattattttgtttgttttgtagggttgttttaggggttatttgaagttattatgatatatgagataaggttgtatgtatttagttttggggtggggtagataggtggtattaaggttataggttattttagtttttggggaggtttagtttttgtttgttttttttttttagattagttatgtttttttttagtggatttggttttgttttgataatggttaggtgttgggtagggattttggggaagttcgggttttgtttttttggatgtagtttgtaggatagttggggatgtggaggtaggggaaagttgggttttgggatcgggtggtttgagttttaagtttaagttattgattatagggatagtttaagtcgaaataatatttttttagatgagagaaaggaagagatgggatgggtatttaggaaggttgtagaaattggaagtttttgtgatgatgttacgattttatttgggagggggtgggagttaggaagtttgggttttggattcgagttgttgtgtgattttaggtcgttttgtgatttgttgagttttttgttttagtgatgtgtgaaaggttgtttgaggttttatttattgtggtttttgtagattttggttaggttttgttttttttatggtttagttggagtagttgtgtttttgtgattttatcgttggattagaattggataagatggtagaggggttgggtttgggtaggaggaggttgggttttagttttaggtcggttttggtgttttagatttcggtatgttttagatttttttggatttttgtttttgttttgtttaaagggatagagtttatgtttcgttttttttttagggtttcgtgggatttagggaggtgtttattgtttgttttttgtttagagggtgggttggtagggaaggatttgtttaagtaaagtgaaagtttttttttgtgtggcgggtttggcgtttttagttttttttttgtttttggggttgtgaagtattggaaggggagttgtagatggtgagatgttcgtggttagggaggaagtatagttgttggtgtttatttgggttaggagatgagtagagtttcggtggttgaatgggtgaaatagattgagtgtatttaatgtagttagtatagttgtgtgtttagtttgggagttagggtcggtttatggtgattattgatgtttttatttttatttcgtaggagtttgtaggtttgaattagggtgatgttgaagatgatgatttttttttaaggtttttagagttattagtttgtgttaggtattttcgatttgtttagaggtttttaaaagttgtagtttatattagaggtagagttagaggtttttatgtcggaggttttttttgaggatttggtgttatttttggaggttggggtagttttatatagggaggaggaagaggcggcgaagaagaagaaggagaagaagaagaagtttaaaggtttggttaatgtgttttgcgtttttattaaagggaagaagaagaagggttagtttagtttagcggagttcgaggacgtagtcgggtttaggtaggggttggatggttcgttttttataggtgttttaggattttgggttagagttagtttggggtttggacggggttggcgtttattcgcgtgagtgagttatttgtatagtgggtcggtaagtggggttggaaggcgcgtttgtttttttgtttttatttgtgtcgtaatttggggggttgggaggtttttagtttagttagggatatcgatattattttttagggtgttggtcgtcggttttgtgcgcgtttaggggaggacggttttcgtttggcgttggtcgtttcgttcggtgggcggtgggttggggtcggggttgacgcggttttttcggcgtagt

SEQ ID NO: 494 - DNA, 5680 bp, Artificial Sequence
  chemically treated genomic DNA (Homo sapiens)
attgcgtcgggaaagtcgcgttagtttcggttttagtttatcgtttatcgggcggggcggttagcgttaagcggggatcgtttttttttagacgcgtatagggtcggcggttaatattttaaagggtgatgtcggtgtttttgattaggttgaaggttttttagttttttagattgcggtataggtgaaagtagggagatagacgcgttttttagttttatttgtcggtttattgtgtaagtggtttatttacgcggatgagcgttaatttcgtttaggttttagattagttttaatttagggttttagagtatttgtggggggcgggttatttagtttttgtttggattcggttgcgttttcgggtttcgttgagttgggttgattttttttttttttttttttggtgaagacgtagaatatattggttaggtttttggatttttttttttttttttttttttttttcgtcgttttttttttttttttatatggggttgttttagtttttaggggtggtattaggtttttagaggaggttttcgatatggaggtttttgattttgtttttgatgtggattgtaatttttgggggtttttaggtaagtcgagggtgtttggtataggttgatggttttagaggttttggaagaaggttattatttttagtattattttggtttaggtttgtaggtttttgcggggtgggggtgaaggtattagtggttattatggatcggttttggtttttaggttggatatatagttatgttggttgtattgagtatatttagtttgttttatttatttagttatcggggttttgtttattttttggtttagatgagtattaataattgtgttttttttttggttacgagtattttattatttatagttttttttttaatattttatagttttagaagtaaggaagaggttggggacgttaagttcgttatatagagggggatttttattttatttgggtaaatttttttttgttagtttattttttgggtaggaagtaggtaatggatatttttttggattttacgggattttagggaagaggcggggtatgggttttgtttttttggatagagtaggaatagaggtttagaaaggtttgggatatgtcggggtttagaatattagaatcggtttgagattggaatttagtttttttttgtttagatttagtttttttgttattttgtttagttttgatttagcggtggggttatagaaatatagttgttttagttgggttatgaaaggggtagagtttgattaggatttatagaagttatagtgggtgggattttagatagttttttatatattattggggtaaggggtttagtaagttatagggcggtttgaagttatatagtaattcgggtttagaatttaggttttttggtttttatttttttttaaatgggatcgtagtattattataaaggtttttagtttttgtagtttttttgggtgtttattttattttttttttttttttatttggaagggtgttatttcggtttaaattgtttttatagttaatagtttgggtttggaatttaggttattcggttttagagtttagtttttttttgtttttatatttttagttattttgtaagttatatttagagaggtaagattcgagtttttttagagtttttgtttagtatttgattattgttagagtaaggttaggtttattggagaagagtatggttgatttgaaagggggaagtaggtaggggttgggtttttttaagaattggggtgatttgtaattttgatgttatttgtttgttttattttaagattaaatgtatgtagttttgttttatgtattatggtaattttaagtgatttttgaaatagttttgtaaggtaggtaggatgatttattatttagaaggagaaattgaggttgagtaggaggtgtttgttttaagtatagtagttatggaggtttagattgggtttattcgattttttttatggtttcgttgtttttattagttttattattttgtttttattttggaggggtttggttagagttatttgagggataggaagtttgggttttttttatttttagtttttgttatgtttatttagtgttttgggtagagttttatatttttggatggtattggtttttttagtgttatttgggttgagtattttattttaggattaagaggggtatgttttagggagttttaggggtaaggttatggggtatttttgttttttattcggtgttttaatttcgttttttagttttttttaggtgtatgtttagtattcgcgggagttggtttgtttggtagggttatttagttttattttgggtgtttaggttttatttttgttatttttttggggtgggggagggtggtttttattagtaatgttttttgttagttttattttagttttttttgttttattttatatgtattaggttttgttttatttttaggtatagttttcgtaggatttttatagtattatcgtttttttttttttgtgatacgaaatttagagcgtttgaaggttttgttgtagttttttgggtttcgttttaggttttcgtttttcgaggtagttggtgttatggaaagagaaacgttttcggtgtgggtttagtatattttttattagtgtgtggattgtatattttttttttttataagtcgtcgttttttcgtttttgaaaaggggatgaggatttttattttatagtgttgttgaggggatgtggttaaatcgtatagttaagtgttgggcgtttagttgggttttagtgggggtgagttttttgtgttttgagtttgttttgtaggtagtagcgagtcggtgtagttagaaaggaagaaggggaggaggggcgtttttttgagttttgtcgttggttgggtttattgaggtaggaaggggtttgttgggaggttcgtagaggggttatagttagtggtttaatagcgttttttagttttttgttgttcggtttttttttaggtttattgatttggttcgtttttttcgttagggttgatgtttatatatttttcgggagttcgttgggttcggtttttttagttttgggtaggatgtggaaggcgtatttatttttcgatgaggatattcgggtacgggcgaggaagtgattcggtttgtgtcgttcggtcggggagttacgtcggatttggggtttttttgttgtaatggaggggagatttttgcgtttgttttagtttcgttttttttgtttttggtaggttcgggtttttagttagttttggtttttttgcgttcggacgcgcggacgttgggcgcgttagggttttagtttttttggaagcgtttagtttttttttgttttcgtcgcggcgataggtttttttttcggggaattcggtttggtttcggggtaggggcgggcgagaagtcgcgcggagcggcggggaatggacgtgtggaagcggaggttatttatcgtgtttcggtttggtcgttattgttttggttcgggtttcgtaaggtttgaaatagtcgtagagttagtttcgtttcgttcgttttttttttttcgtttcgtcgtaatcgcggaaaattcgcgggcggaggttaaggtttagcgcggttcggttgtgtttttgcgttttaggggttgggcgcgttcggtttgtttagcgggggatgcggggcgttgttatttttttttagtagtcgggtaggggcggggggttggtcgcgcgtcgtatggtatgtggagttcgggggacggtacggggacgacggggttgttaggcgcggagttattgttcgacgacggtttttgataggtcgtttggatggggcgcgtttggtcgcgttttcgcgttatatatcggttttagttgcgggagagttcgttttattttaattttttagtcgtttttttgaagtgtttcggtgttatcgtggttataaggaggtaggggacgggggttttttgaaggaggttttttaaggggaagggggttataaggttggttagagtgttggtcgcgcggttgtgtatagggttttgagttttttcggtcgttaagttttgtttgaaatgcgtaaatgcggaaaggtgaagtggttgattcggtttatattattttaagtagcggagtggggtttttagttaggtttatgggatttttattggagtttttttttttttggggttggggttggatttataggttgtcggagtaggtagaaggggaggggtttaaggtttagattttagggtttcgtttggattattaattcggttttgtttatttagcgtaggttttcgtttttaggtttgtttttttatttatatcgttttttagggtttgttttgggagatgtgggggtggggtatgtggggaggatggaaaggggttgtgaagggaatttattggagatttatttttttttttattttatattttaggttaggaatttttgttttttggaaaggatttagatatttaggaatttttcgttgggtaggggttttttttttgttttattggggtttttgtttttttttttttttgtttggttttttttttcgttttttgattatttcgttattttttttgtagtttagtaataggttttttaggattaggggggttagcggagtgggggcggttgtgggtttaggtgttttgggaattgagaatttttttttttagagtgttggttaagcgttaggtttgtattcggattgttatttattattttgtttttggggaatttgtgggggagcggatgcgggaggtcgttaggatgtaggatggggcgttaaggttgttaattttatttttttttttttaggattttagggatgatattttttagatgagtttatagagtcgcggtgtttcggggttgggagggtttttttatcggtatcgcgtagatggagtttatttatataggggcgatgaggatacgggttgaggggttttggtcggtggttgtttttacggttggttgttgtggttttattgtgtaatttttataagttttttttgttagattttgtttttttattttatttttttatttttttttttatttttaagtagatcgggaaattgttcgggaagtttgtatttgttaggagggcgttgttaggttttaggttttattgttttttcgaaggtagtttttggtttttacgggttttgtagggttgaggcggggttgttatttttgttttttattgacggtagtggttcgtttagagtatcggttggggattgggaaacgaggttgttgttttggatttgtgtttgtattagttattttttttttttaagtttaggtatgagggttaatggtaatatacgtgaagtttttaagataaggaaagttttttgaaaatggggtagtatggaggtttaagggatgatagttaatggggtttatagggtaggagtagtttttatttttttttcgtagatgtagaaagtagtttttaagaggttaggtatttttagaggagttaaaggttagtttacggtttttttttagtaggaagttagtattatatgttgggtggcgatgtttgtgattagtggttagcggttgttttattttttagttttttagggtataggtt

SEQ ID NO: 495 - DNA, 925 bp, Artificial Sequence
  chemically treated genomic DNA (Homo sapiens)
gatttatcgatatattaggttgtttgggttggtttttgggttgggagttgttttaggtgttgaggagggtagttttttggttggtgaggttttttttagaattatttttggattgagttttggggagggatggtattaggtgggtgaggggggttgtttggggagggaggggtttttatggggcgtggcgaggttggtttagtttttttttcgtttatatatgtagggtagtagtaggatgggtttttggatttgggcggttttttcgtaggcggatcgggggtaaaggaggtggtatgtcggttaggtatagtagggttttgtgttcgcgttgagtcgcgttttttttgttttagtaaggattatgagggcgttggaggggttaggtttgtcgttgttgtgtttggtgttggcgttgtttgttttgttgtcggtgtcggttgtacgcggagtggtagaaatatttatttatttttggcgggacgtagagataggggagcggttggtgtgcgtttagtgttttttaggtatttttgtgtagcggtcgtgtcgtcgagatagttttacgacgtgtggttcgtgtttatcgcgttattatacgtagttttggaattatttagagcgttgtcgttattgtaacgttttttgcggggagcgtgaggaggaggtacgggtttgttacgttatttataatcgtgtttgtcgttgtcgtatcggttttttcgcgtacgttggtttttgtttggagtacgtatcgtgtttatttggtgtcggcgtgattgtttcgggtgagagttgggcgaggggaggggtttttaggagtggtggtcggaggtgtggtaggggttaggttgttggttttagttttgtattttgagttaggatattagtttttttgattttgttttttttttttggttgtagg

SEQ ID NO: 496 - DNA, 925 bp, Artificial Sequence
  chemically treated genomic DNA (Homo sapiens)
tttgtagttaggagggaagaatagggttaggggaattggtgttttagtttagggtgtaaggttgggattagtaatttgatttttgttatattttcggttattatttttgggggttttttttttcgtttagtttttattcggggtaattacgtcggtattaggtggatacgatgcgtgttttaagtagaaattagcgtgcgcgaagaagtcggtgcggtagcggtaggtacggttgtgggtggcgtggtaagttcgtgttttttttttacgtttttcgtagaggacgttgtagtagcggtagcgttttaggtagttttagaattgcgtgtagtggcgcggtggatacgggttatacgtcgtggggttgtttcggcggtacggtcgttgtataaaggtgtttggggggtattgggcgtatattagtcgtttttttgtttttgcgtttcgttaggggtaggtgggtgtttttgttatttcgcgtatagtcggtatcggtagtagggtaggtagcgttaatattaggtatagtagcgataggtttggtttttttagcgtttttatggtttttgttggagtagggagagcgcggtttagcgcggatataggattttgttgtgtttgatcgatatgttattttttttgttttcggttcgtttgcggaggggtcgtttaagtttagaagtttattttgttgttgttttatatatatgggcggggagagggttgggttagtttcgttacgttttataggaatttttttttttttaggtagttttttttatttatttggtattatttttttttagagtttagtttaagggtggttttgggaggggttttattagttagggagttgttttttttagtatttggggtagtttttaatttagagattagtttaggtagtttggtgtgtcggtggatt

SEQ ID NO: 497 - DNA, 17280 bp, Artificial Sequence
  chemically treated genomic DNA (Homo sapiens)
tttgtaaaggtttaaatagtaaatattttagatttcggtagttgtgaggtttttgttgaaattatttagatttgttgttgtagtggaattgaagttatagatgtatatataaagggatataattatattttaatataattttaattataaaaataggtgtttgttagatttggtttatggtttagtttgttagttttgttttaaattttttttttattgtttttgtttttattgggtttttttaatgaagtgttattgtggttcgattttaatatttaatttttttaagttagttttagtaagataaagagttttaaagttaaagggataggattttttttttttaaaaggttatttagttatatgtgttattgtttgaatatattttgggtgagtttgtttttgttttatatatatttatagtttaaaaatatatatttttattatgtatagtgattattaaaagataattttaaatggataaaattattaagttatttttaatggtaaaaatcgtaattatttttgtattaatttaatgatttttaaatggagtaaaatgtttttattttattttaaatatatttgtattttagaaaggttttgaaggtatttttagagtttgtagtcgtagttaaggttagaaagagggtttaataaagggagtagaaaaattagtttgtaaattaatatgatttagttatatggttttagataataatttttattatgttttagtttttttatttatataatggaggtggtagtttatttgtttaaaggttaaattttggattagatgattttttggagattgtttttttaaattagtgttttttaaatggttttaggtatttgtattttttggggtgttttgttaaaatagattattagattttagtttgagtttttgaattagagtaggtttagagggttttaaagtggtattaagtttttaggtgttattgttgttattgttggtgtgggtttatatttgaaggtttttagtttttataatagagattttttagttttttatataggaaagtaatgttggaggaatggttattgttggtttttttttattttttaaaatggtttttttttttgaagggatgagacgttagttttatttgtttattgagttttaggtattgtagttatattttagtagttaattttaggttgaaaggaggttgggtggttatttttatgaggttattttttggagaaagatagagatacggagtatagttgagaagagagaggtaagaatgttattatataatttttttatataagttatttttttagaattttttttttttataaatatgaagtatagattgaaggttaattttgtatatatgattagtagtaagaaacgtaaggtgggatgtaaggatttagaagattaggaaagtgtagatcgtttttagggatttttattttatgagtaaggtaatatttatatgtgtttatatatttgggttttatattaagagaagtagataattagataattaggttatgtggtatgaaaatagaggtattttagagagggtgttggtggatttgagagatttgggtaagtatttttggagatggtgaggcgggttggtaaaggttggaagggagaggaagaataggagtagtggaaagttaagtaaaatacgagaggaagtttggatgtatttggaatattagtagagtcgatatgagaatgagtagagagggtcgggtaagtagagggggttgggtgcggtagtttatgtttgtaattttagtattttgggaggtcgagataggtagattacgaggttaggagtttaagattagtttggttaatatggtgaaattttatttttataaaagattaaaaaaaaaaaaaaatagttaggtttaggggtgtgtgtttgtaattttagtaatttaggaggttgaggtaggagaattatttgaatttaggaggtagaggttgtagtgagtcgagattgcgttattatattttaatttgggtgatagggcgagatttagttaaaaaaaaaaaaaaaaaaaaaaaaggagagagaatgagtagaagggatttttatatttgtttttttttttgatggtatgtattttttttagttgtttttatttttgtgttttagttttttttttttgtggaatgaaggatttaagttaaattttttgaagtttttaaattttatttattttggagagattttatgttagaaaagggtaaatgagtaggtgaagtttagtttttttttttgttttatttgtgttttagttaaagtagttttgtttttttatgtttttatattttttatatagttttgtttttagaaaggatttaaaatttatttaataagaaattttataaaggttttttttatttgtatatcgtatagtttgagtagaagatagaaagaagttagttagtataggttatggatttttatgttggttaggttagattttagaatagttggaaagtagagaggggtttagagtaatgggggtgggaaatagggagttattgaaggtttgtgagtagaggagtgttatagtaaaagaatgaattgagtttataaattattgtattaggaattgattcgaaaattttaattgtttagaaagttgagtaaaaataaagggtgattttttttttttgttagtttttttttttaggatattgtattgtatgtaaaacgggtaattgtaagataaatatttttttttattgttttttttagttttataggtttttaggaagattcgaattttaagtaaagtttttttattttttaatatttatagtttttatttaataattagaagttttttattttgattaaagaggttgaataagagggttaagggagtagttggtttttagtaattttgggtagattatagagtttttgttatttatttattgttcgtgtttattagaggatatagttttttttttaaattagttaggtatatgttttagaaaatattggtttgtttcgtttttattttaattatcggattaaacgaacgtgaatatattgtttttaaaattaaatttaattgggattacgggggtttcggtttttttgattgtaaaatgggtatatcgttttttattttatttagtttaagaaaataatttattttttgatgtttttttcgtttttaggatttatgtttttatagatttattgggaggaaatatttagattaaattttaaagtttgatttaatttgggagatgtttagaagttttggttttatgtaagaatagtagtggtaataatttaagtttggttttagatataggacgtttttttaggggtatttgggatttttgttggtttaaagtgatgcgttgtagataaaaagtgagtagaaaggaaaggaggtgttatgtagaatgagttttttttacggtgatattaaatggagtttttaaaggtttatatttggaggtagtagttatgtagtgattaatattttaaacggtattttgaaatggagattattagtaattatagatgtgatttgattttgttttttaggtaatttgtttattgtatttaaattttagatttagtttagtagatagtttgggatgtttaataggaattgtttaatattatttttaaatttatttttatttatggagtattttgatattatttcgtttggtttttttgatgattgtaatgtagattgggaatagagaaagttataaagatttgtatgatggtttaaggttaagaagggaaagggttgagattatattttaggttttagtttttaggtgtagtgaagattgaatgatttagtacgagtttttagttaggtaggttgtaaagtgtatttaagtttttttagtgatcgatatttgcgatttaggttgagatagtttttattttttttgagttttagtttttttatttgtaaaaaataaatattgtttgtttcggagggtggaggtggaagtggaatgaagttatatgtaatttttagcgttgtgtttgagatagtagaggtttaattatagtagttatatatatatataatatatatatatataagatataatatattatatataatatatatatatatattatatataatatttatatacgtattatattcggtatgtattgtagattataaatgtatattatatatatattgtatatatatattatagagaatatataatatttatatatatttttatattataaatatatatatattatatagtatattacgtagaatatatatagtttttatattttatattatattattttattgttaatttttttttttttttatgagttttacggtaggtttaggtttatttgttagtttaatagattttaaaatttttgtaggagtgtttgtttaaaagattgatatttttagatttttgttttttgatagtatttttgaattttaaattttatattgttatgagttagtttttttttggagaaatatttttatttgtgtgtttttttttttttagggaatttgtagtatgttttttttttagtagtagtttattaaatcgaattttttggagttattatattgtagttcgagggattcggtttttttgagatttagtaaggatttattatttggggaggttttttgagttataggtttcgttgaaagaaggtgtagttttttgaataggaaggcgttttgtggtagagtttaaacgaaatagaagttgttttgtgtgtgcgtacgtatgtatatatatatatatatatatatatatatatatatatagtcggggaatcgttatttttttacgcgttttttgatattagttattttttttgtagttagtttttttgtatataatttaatttttggtaatgaaaaatgaattttttttttatttttgttgtcgtttttcgttttacgtttttagagaagagtttttttattaggtagtaggtgaaggtttttttttaagttatatgatttaggatttagggggagaattttttttggaatagagatgggtttagaattgaattagatgaagagagataaggtgtgatgtggggaagattatataaagaatggatttagggttgtagtaagtatttaacggaatggttttttttggagatatagttatgtatgtgtcggcgggtttcgtggttagttatttggggattacgagtcgtagttatttttatttgattatagttattttggttttgtgttttgtttttacggtggttattattatggtgttggtcgtttagaggacggtaagtggattttttttttttttttttttttttttgttgttttttcgagagaaagagttttgggaataaatgatattcgtttgttggttaagagtataaaataaaattaaataaataaattttttttttttatatatatatatatattatagtatatattgtataacgtaatatatttatgttatataatatatattatattatatagtatatattatatatatatatatatatgagaaagggagaaaagaaagaggaatttaattttttaaaataatttggtttgttgagaaaaatattgttagattattattttaaaattttgtagatttgtttgagtaaaatagtggaggggagttattggttttttaaagttaagatttaaattttaatgagttagagatttatattaaggaaggaagtaatagagaaatttgataatatatttgtataagttgttattatgtttttaaggattttagattggattttgaggttttatattttaagtttgagtgttttggaggtttttgaggttttatttattgttaagagttttgtttttgtttttgttttatataaggagttaagttttagaggttaaggtttagaaggaaaggaggcgaaagagaagattatggttttttagagttttggatattttggtgttaaagttagtaagataaatcgaaagtttttttttaagttataattttgaagaagttagggcgttataaaaaaaaaaaaaaaagaaatagtatatagaagtagaaagttgaaaggtttttagtatttgttttttttgatgttttttataatattaagtaatcgttgggtatatattgtatagggttagattgttttcggagatttattttgaagtaaatggtaagatttgtttttgaaaatagaagaggaggagaaagaggaagtttttttatattttagaaaattggtgtttatagagaatttattagtatatattatatagaaaatgttgtagtaatagtatatattgtttatgaattttttgatgaagttgttaatgggtaatttaagagttgtatttatttatatgatttgttaaagtgagaatatttttgttttttattttatagtgtttatttttcgtggtattataattttgttgaatttattttggtttttttttagtttttttaggttaagtattttatagtttattaattgttggaaagaattaggttttaaaaggttttgatatttattttttaagtgttattaagttttgaaattaaatggaagttttgaagtttatatttttataaaagtgaaaagaaggagttgtaaatatttgatttagatagtggaatttttaaaatttataatttaatggtttatttatatttattaagtataataattttgaaaatattttaggatatttttttttttgtaggggttttgtaatttttgtaattttaatttggagtgaattaagggtatgttattttatagtaatggttaaagaaaagaaattgaagtgttttttaagaagttttttagttaaaggatttaattagaattgttgagagagagagagagatggtggaaaaatgggtggcgatggtgatatataaagttagagagaattttagagtttatttatatttaatttttagttgaattgattttttttataaaagaattagagtagatttttttgttttatttttgtaaatgtggaaaatgaggagtagagagggaatagggtttgaattacgttattttgagaaagtggtagagttaatattgtttgattgtttgatgtaagtagtattttttttgttaatatagatagttatagaagtattaagaaatattgtatttattttttttttgggagttttatttttttgtgtatttatttttttgatttattttttatgtttggatatgaaaagatttattgtgtaatttgattgtatagtgcggtgtgttgtgattttttagattaggaaatattagttgtttttttaaaattaaggtttgttatgttaatagtagtcgtggtatataaagtgttaaatgtattgtatatattatttttaataaattttttagattttaattgttgtaagatttaataagaaaaaaaaaagtattatttttttattaatttgagttattaggaagggttttttataggaagatggaatgtagattgatttgaaaataggaagaatttagataagtgaagagattttaaaagaaattttaggaaagaaattaatgggagaaagttaaggagtttagatttatattattattattaaaaatggaatgagttaatggttaattagtattttgtatgtgatgggaataggggtggagaattataagaatggttttattggtataagaagttatataatttttattttaaggtacgtgtatagataaaatttaaaatagttaagttataatatataatgagtgattaaagggatattatgatattataagttaaggagagaatatatttttttagataggtttaagaaaaatttttggggattagttttaggttggtttgagaaatgtgaataattttaaataggtagggaagggaaagtagaggagaggtatttttagttaatggaatagtatgagtaaagagatagaggagagaagatagagaaagtgtagggaaattaataaagtttgttttgaggtttgatttgaagattagataattttaagtttaaattttttgggagagataaaggaggaatttaggtttttattttaaatatttattaaatatttattgtgtgtaggatattgttttaaagttttgaaaaaaaataataaaatttttgtttttgagttattatggaatttattttttttttgtgatatttttgaagttttagtggtggttgtattttgttttatttatatttaagttagtatatttataaaataaatattattttatataataatattattttatattataaaataaatattttatattataaatatattataaaataaatattttatattataaatatattataaaataaatattttatgttataaatatattataaaataaatattttatattataaatattatattataaaataatattttatgttatttaatattttataatatattgatatattttataatatttatattaggaaatattatatttatatggtttaagaaaagtaattagtaaataagagaaaagaaagtaaaaatttttatattttttttatttaattattaatttttttttacggagataattattattgatagatttttgtgtgtttttttaaaaatttgtgtatttataaatatatagtatatattataatatataataaatttatgggttattataataaatttataattttgtattttgttttatttatttgataatatattgtatattttagagatttttttatgttagtatatagaagtttattttatttttttgaagagtcgtatagtacgaagtgtaaatgttttataatttatttgtgtttggtgagagatattaatgttttttttagaatttgtgttttttgtgcgtgtttgtaagtatatttggggaataaatttttagtgataggaatggaatgtgtattttttttttttttttttttggagatagtttcgttttgtcgtttaggttggagtgtagtggcgcgatttttgtttattgtaagtttcgtttttcggattttttttatttttttgttttagtttttcgagtagttggaattataggtgttcgttattacgtttggttaatttttttgtatttttagtagagacggggttttatcgtgttagttaggaggaatgtgtattttcgttttaataaatgttagtttgtttttaaagagattgtattagtgtatttttgaggaattaaaagttttattaatagatatttttttatattaatatggaaagaaaaaaatgatttattgttgagtaagtataattgtatatgtaaataggtagtttgtaatagattataaagttaggatgaaattttatataattaatttagtaaagtaaaagaagaaaaaataaaattttttttatttttttaagagataggggaatatataatgagatagataatgagatagatttttaggttaatattataggtaggtgtttatattttaaaaagtttttgaagtttttaattttagagacgtttttgttttgtaaattaggagattgggtttttttagttttaggggagaatgtaaagggttatattttaaaaggttggagtatagggtttataatcggtaggtttttaagaaagaagttgttttttttttttttataagtaaaaaaaattttttttttaaaaataataataataatattttttttaaattatttttatattaatagtggagttgagtatttgtttaaggggagtaattattggtggtggtgatggtggtgtggtattttgggtttatttttaagtttagatataaaatagaagtgtagggtaaatatatttgatatagtaataattgaagtatatttttagaataattatatatggtagatacgtttgaatgggtgttttaagttagagagtttaggagtggttaatttggagatttattttttgtttgtgaggaatatttgagtttttagtttatttcgtggaatatgggttatataggagattgaggtttgagtttttggttatatgaaggttgttaggtggaggttattaaggggaggttgttaagtgagtatgttatagaaattgtatgttatttgtaagtggttgtggtttttttgtttaatttattattattggacggtatataaggtgaatatgttgtttagtttgttgttatgagattatttttgttcgtaaagtagtttttttgtttagtttattgttattggatttttttttttgtatgtaagtttttaataaaattttatattttgtttgttgattttatattttttttttagttttttgaatatggtgttttttttgttgagttaataggagttcggtataagaagaagttatttggaatgttttatgatattttttattatttaaggtattttttttatttgatatttattttatttagtaatttagaaaaatttattgtaaatttttttaggagcgagttttgtgtgaggttatgtggggaggtttttagtggaaggggtaagattttgttttttgggaattttgttaaattgagtagatgaagtttaaatattaagtttttgggtttcgggtagaatggtatagaatgttatagagtaaaggagaagttatttttgtttgggatgaaggaggagtttgtagaagagttagaataaaagttaggtttttaagaattataatagttatggtttatttttaaagttttattttgaaaatgtttaaatttatagaaaagtggaatggtaaatgttaatataattttggtatttagattgttgtgttaatattttgttgtatttttgttttttttatataaggatatgaaagtaagttggaggtagtatgattttttatttatatgtattttagtatttattttttaattaattgtaatgttattattattgttaagagagttaatattaatttaataatattatttaataataatatatggtttatattttaatttttttatttgtttaaaaatgttttataggtatggttgttgtgtttttgtttgtttgaattaatttagggttatatattgtgttatgataatatttgttttaatttagaattttgttttttaaagtgtggttttgggttttgttagaaatttaaaattttagggtttattttagattttttgaattcgaatttgtattttaataagttttttaggtgatttgtatgtatattaaagtttgagaagtatcgagttaaaattttttttgttttttggtgtttgttttaaataatattgatttttttttaaagggtttaggttaattttgttgtagaaatttatttatagtttggatttgttttagtattaatttatggttatatttagatgaaatatttttagtaagaatagtatataggtaattttatatacgttttattgtagtatagttagagatatatgttaggttgttttattttttttgattataggtttagttatttgattaaagcggtgattattaattatcgtttttgtaaaatatttttttttttttattaataagtaatttggttaggagtagtggtttatgtttgtaattttaatattttgggaggtaaaggtgtgtggattatttgaggttaggattttaagattaggttggttaatatggcgaaattttgtttttataaaaaatattaaaattagtcggatgtggtggtatatatttgtagttttagttattagggaggttgaggtaggagaattttttgaatttaggaggttaaggttgtagtgaatagagatggtattattgtattttagtttgagtgatagagtgagattttattttaaaaaaaaaaaaagaaagaaagaaagaaagaaagaaagaaagaaagaaagaaagaaaaagaaagaaaagtaatttatgtatgggataatattttgaagatataaatattttttatttggtggttttgttattttttaatgatttttgtttgaattagttaatgtattgagggttgaaaaagagggaatgtttaagtttgttattttttttaaatttattagttgttatttttttgtagagaagagttttttattggaaagatggtggtaggaggaggaggagtaggatattttaggtgaggtaaaagagaaagtagtggtatagtttataagaaggtaagtttaggtgtgaggagaggaatggtagggttagaagttagtttagattgtatagaggagaagaaacggaattagatgataaaaagatttgatagaagagacggagaggataggatattattgttatttttaaattagaaagattttttaagtttatatttgagtttaaatttatatttagttttttatagttattttttaagattttaggtgttttgattgtttattgagtagtgtatttaagattttgttatttaaggtgtggtttatggtttggtaatattggtattatttggatgtttattaaaaatgtaaaatttaagggtttttttttattgagttagaatttgtttttattaaaatttttcgatgttggttagttttttaaagtgggagaagtattgttttaagttattgtggtttattttttattttggtagattatgtgtttttagtaaaaatagtttttttttgaggattttttatgatttttatttatttttttatgaaattttaggagatttttttgtttagttttattttgtttttatttagagaggtaatgtagtaggatattgaagagtagtgtttttaaagttaaatatttaagtttgaattttttttgtgttattcgttatttgtgggattttttataaatattattatattatgaaattatttttttaagttttgatgaattcgtaatttttggggttaagttaaaggttaaatgaaatagtgtatgtagagtaatttttattaagtgtttaatgaattagtttgaaaataagaggtatttttggtaaaagtttttttgggttatgagttagagtttattttataagattatgtgagggtaataaggaaaggaatgtggattttttttggtatattttaaatagagttgtttttgattatttttggtttacgggggtattttgtgtttaaagtaaatttaggagtttattgtatttgttgattatttttttgtgaaaagaaataagttttttaaggtattgaggtaaattaagtatattattaatattaaggtagtgtttaaaatagttatgttttttaaatatttgttaatattttataatattttatgatgtttataataatttagtggaaagatggatgattagttatttaattattgattaaaggagaagaaaatattttaaggtaaggaagatggttgggatgggggttattttatttggagataaataggttaaatatgattatttttttttttatatatgaaaataattttattattgttgggaatatttattagatatttatagaggttaaaaatagaggaagtatatttaaggaagtatatttcgttgataattacggagataaagttttttgagttatttagtggagttgagaatgaaaatttgggagagtttatttgtttgtgtttgtatttagtttaggtattattttatataaagttaagttattgagtaagatagtttatattttttgagttaggatttagatttttagataagattagggagagaattttaggattgggggatattttgttaaagaggagttggtgaataatatttagtgtaatatttgtttatgaatagtttttattgaattttaatagttattatttttttagatattgtttttttatttttaaatgtagggattgtttatgggagaggggaggagggaggaatgagtttttttattttttgtttttggaaatagtattttttttagggtagtggaaagtatattagagaattttagtttaagatttgtttttgatttatgagtgttttggtttttttttttataaaattagtttgatggattgaaagatgttttaatttttttttggttttgattgtttaattttgattattatgggtagttaggagaagttgtaaagattttattttaagagttttttaaaataggaatagttacgtttttgttatggattttttgggttttgggtgaaggtttaaatgataggttttttttttgtttgagatgttttgtttttgatattttatgtttgaaattaggaaattagaatgtatttaagtgatagagagaaaagaggttttttttgatttttatataaattaggtttttttttttgatattattttttatagttgtgttatttaaagtgttttgtgggttaggagtgttagtattattcgaaagttgttagaaatatagaatgttggttaggtgcggtggtttacgtttgtaattttagtattttgggaggtttaggcgggtagattataagaggttaggagtttaagattagtttggttaatatggcgaaatttcgtttttattaaaaatataaaaattagtcgggggtggtggtgggtttttgtagttttagttattggggaggttgaggtagaggaattgttcgaatttaggagatggaggttatagtgagtcgagattgcgttattgtattttagtttgggtgatagagtgaggttttattttaaaaagaaaaaaatgtagaatgttaaattttttttaaatttgtagaattagaatttgtattttaacgagatttttaggtgatttatatgtatattgaagttttaatagtattattttaaagtattatgattttttttttttatagtttttgttataatttgtaattttaattatatatttatttatattttttaaatggttgttttaatgattaaagtataaaatttataggatgttttttagtgattaacgtagtttttattatagattaggtgtttatttaaggtgtgttgtatgaatgattttttaggatttttcgaattgttagtagtttttgtaatgatggttgtattaggtttgttattttagttttttttattgtttttgtatatgtttttgggtagtttgatgaatttgatgattgtggtaagatattttaatgtagatattttttttagtgtatttgtatattatgttaattaatggttacgtttggtagtaagttgtaagttgtttattaaattttaaaatgttgtgtgttgttttataagggtaatataaaggggaattttgtgatattaagtttttttgtaaattgtatgtataattgaaagattataaaaatttagttttgttaggttaaaagtttttaattaaggtaataaagtcgtagattgttatagtaggaagggttttttaggataagtttgtttttttttttttgagaaggtagggtttaaatgtttaagttgattttttttatttttagattggtgttgtgttagggttttgtttttaggagatttttttgatttattattaattttttgtattagagaagagatttatttataagaaaataagtttttagcggaaggtaaatgatagattttttagggaaatgttataataataggggaattttagatggttttagtgtttatatagaatattaagaaaataagttgtgggcggttgttaattttttgttttggtagaggttaggaagttggttttttcgtatatatacgtttatatttttttaggtttttattaatattttaatttaatgtaatataggagattttaatttgggtaggttaaaagatgaataaaatattttattttttattggtagaatattgtatgggtgtttttatggttggagagaaaggggagggataattagggtgtgaaatttagtgtttgaagaatttattaggggaaaagaattgtgtttttttgtttttgttaattttttgttgagagtttttgaattagaatttttttttagttatttttaatttttagtttaggatttttttttttaaaagataatttgtttttattaattttttatttgtgtaaatatttatgtatatatttattatagaataaataatatattatgtaaatgtttaaatatataatatgtatttgtatgtatattatatgtgtatatatatttgtatatttaaatataaatttgtaataaatttataaggatggggatttaatttaattatgtatggtgtttttataatgtttggtatataaatatataattaatttagaatttttaattataggagatatagagatgtatttttttaggtatgtttataatatacgtttatagatgaattaaatatggaaaaaaaaaaaatatatttatttttatgatatatttgattatttttatgttgattagaaggaaaaaaaaagaaaaaaatatttaaatatatggaggggggaaaagtattagattgggagttgagttttggttttagtcgagtgtgatagtttatatttgtaattttagtattttgggaggttgaggcgggtggattataaggttaggagttcgagattaatttggttaatatggtgaaattttgtgtttattaaaaatataaaatttagttgggtgtggtggtgggtgtttgtagttttagttattttggagattgaggtaggagaattatttgaattgggaggcggaggttgtagtgagttaagatagtgttattgtattttagtttggtaatagagtaagatttttttttttaattagttgagtgtagtggtgtgtatttgtatttttagttatttaggaagttgaggtaagaggatcgtttgaatttaggaggatgaagttgtagtgatttatgattatattattgtattttagtatgggtgatagagtaaaattttgtttaaaaaaaaaaaaaaagttttagttttggtttttgattttttataaattaattatgtggttttaggtaagttattttattttatttaatttcgtgttttttgtttgtggaacggggatagtaatttttattttgtatttttaatagattgttaaataaatggatagaaagtttattggaaattatattagtgaattaatttttaaaatttaggtggaggatgaattgtaaattgtatagtattttaaggataataaaatgaaaaagaaaaaaaaaagttgttttaattgaatgttatattttatgttgtttttttttttttttttttttagg

SEQ ID NO: 498 - DNA, 17280 bp, Artificial Sequence
  chemically treated genomic DNA (Homo sapiens)
tttggaagaaaagaaagaaaaaagtagtatgaggtgtgatatttagttgaaataattttttttttttttttttattttgttgtttttaaagtattgtgtaatttataatttattttttatttgaattttaaaaattaatttattgatgtagtttttaatgggttttttatttatttgtttgataatttattagaaatgtaagatgaggattattgttttcgttttataggtaagagatacggggttgagtgagataaaatgatttgtttagggttatatagttaatttatagaagattagggattagagttgggattttttttttttttttagataaagttttattttgttatttatgttggagtgtagtggtatgattatgggttattgtagttttatttttttgagtttaagcgatttttttgttttagttttttgagtagttgggagtataggtgtatattattatatttagttaattaaaaaaaggagttttgttttgttgttaggttggagtgtagtggtattattttggtttattgtaattttcgttttttagtttaggtgatttttttgttttagtttttagagtagttgggattataggtatttattattatatttagttaagttttgtatttttagtagatatagggttttattatattggttaggttggtttcgaatttttgattttgtggtttattcgttttagttttttaaagtgttgggattataggtgtgagttattatattcggttagagttaggatttaatttttaatttggtgttttttttttttttatatgtttgggtgtttttttttttttttttttttttggttaatatgagaataattaagtatattataaaagtagatgtgttttttttttttttatgtttgatttatttgtgaacgtatgttgtaaatatatttgggaaggtatatttttatgttttttgtggttggaaattttgaattaattgtgtgtttatatgttaagtattgtgaggatattatatataattaaattgggtttttatttttatggatttattataagtttatatttaaatatataaatatgtatatatatgtagtatatatataaatgtatattatatatttaaatatttatatagtatattatttattttgtaataaatatatatataaatatttatataaataagaggttgatagaaatagattgttttttgaaggagggaattttgggttggggattgaaggtgattaaagggaggttttagtttaaggatttttaataaggagttaatagaagtagagaggtatagttttttttttttaataaattttttagatattaagttttatattttgattgttttttttttttttttttagttatggagatatttatataatattttgttaataaggaatgaagtattttatttattttttgatttgtttaggttggaattttttgtattgtattgaattaaaatattagtaaagatttagagaggtgtgagcgtgtgtatgcgaaaaaattaattttttaatttttattaaagtaagaaattagtagtcgtttatagtttatttttttagtgttttgtatgaatattaggattatttggagtttttttattattgtaatatttttttgggaggtttgttatttgtttttcgttgaaagtttgtttttttatgaatggattttttttttagtgtaagaggttggtagtgagttaaggaggttttttgaaggtaaagttttggtatagtattaatttggagatgggggaagttagtttaaatatttgggttttatttttttaggggaagggaggtaaatttgttttggaaggttttttttattgtaatagtttacgattttgttgttttagttgaaagtttttaatttaataaagttaagtttttgtagttttttagttatgtatgtagtttgtaggaaaatttgatattataaaatttttttttatgttgtttttgtgagataatatataatattttaaaatttaataaataatttataatttattgttaagcgtgattattgattagtatgatgtgtaaatgtattaagaaaaatatttgtattgaaatgttttattataattattaaatttattaagttgtttagggatatatatagggatagtgagagaggttagaatagtaaatttggtatagttattattgtagaggttgttagtagttcgggaagttttagagaattatttatgtagtatattttgaatgagtatttggtttgtggtaggaattacgttagttattaaaagatattttatggattttatgttttagttattaaggtagttatttaaaaaatataaataaatgtgtaattagaattgtaggttgtggtaagagttatggaggaaaagaattatagtgttttaaggtagtgttgttagaattttaatgtgtatatgaattatttgggagtttcgttaaaatgtaaattttgattttgtagatttggggggagtttaatattttgtatttttttttttttgagatggagttttattttgttatttaggttggagtgtagtggcgtaatttcggtttattgtagtttttattttttggattcgagtaatttttttattttagtttttttagtagttgggattataggggtttattattattttcggttaatttttgtatttttagtagagacgggatttcgttatgttgattaggttggttttgaatttttgattttttgtgatttgttcgtttgggttttttaaagtgttgggattataagcgtgagttatcgtatttggttaatattttgtatttttggtagttttcgagtaatattgatatttttggtttatagaatattttgaatagtatagttgtgagaagtaatattagagaggaggatttaatttatatgggggttaaggaaagttttttttttttttgttatttgaatgtattttggttttttaattttagatatgggatgttaaaagtagagtattttaaataggaaagaaatttgttatttaaatttttatttagggtttaggaagtttatgatagaagcgtgattatttttattttgaagagtttttgggatgaggtttttatagttttttttagttatttatggtagttaagattagataattaaagttagagggagattgagatattttttagtttattaagttaattttatggaggaggaaattaaggtatttatgagttagaggtagattttggattgaaattttttggtgtattttttattgttttaggagagatgttgtttttagaaataaaggatagaagagtttattttttttttttttttttttttataagtagtttttgtatttggaggtggagaagtaatgtttaaggagatgatggttgttgaaatttagtgaagattgtttataaataggtattatattaagtgttgtttattaatttttttttggtaagatgttttttagttttagaattttttttttaattttgtttggggatttgggttttagtttaggaaatgtgaattattttgtttaatgatttggttttgtgtaaggtagtgtttaggttgaatgtaggtataaataaatggatttttttaggtttttatttttagttttattgagtagtttaggaaattttgttttcgtggttattaacgaggtatatttttttaagtgtattttttttgtttttggtttttgtagatgtttgatgagtatttttaatagtaataaagttatttttatgtatggagggaggaatggttatgtttaatttgtttgtttttaggtaaaatgatttttattttaattattttttttgttttggagtgttttttttttttttaattagtggttagatggttaattatttatttttttattgggttattgtggatattataagatattataaagtgttagtaagtatttgaaaagtatagttattttgagtattgttttggtgttaatgatgtgtttaatttgttttaatattttgaaaggtttgtttttttttatagaggaatgattagtagatgtaatgagtttttgaatttgttttggatataaaatgttttcgtggattaaaaatgattaaaggtagttttgtttggaatatgttaggggaagtttatatttttttttttgttgtttttatatagttttgtaaggtgggttttggtttatggtttaaagggatttttgttaaggatattttttatttttaagttaatttattgggtatttaatgagggttattttatatgtattattttatttggtttttaatttgattttaagagttacggatttattaagatttagagaagtgattttataatgtgataatgtttatagaaggttttataggtggcgaatagtatagaagggatttaaatttaggtgtttgattttgaaggtattgttttttaatgttttgttatattgtttttttagatgagggtaggataaagttgagtagaaaaattttttgaaattttatggaaaagtgaatagaagttatagaaaatttttaggggaagattatttttattgggagtatatggtttgttaaagtgagaagtggattatagtggtttaaagtagtgttttttttattttaaaagattgattagtatcgggggattttggtaaaagtagattttgatttagtagggaggggtttttaggttttgtatttttgatgagtatttaggtgatgttaatgttgttaggttatggattatattttgagtagtaaagttttaaatatattatttagtaggtaattagaatatttgaggttttgagagatggttgtaggaggttgagtatagatttgggtttagatatgggtttaggaaatttttttagtttgaagatggtagtgatattttgtttttttcgttttttttattaaatttttttattatttagtttcgtttttttttttttgtataatttggattgatttttggttttattatttttttttttatatttgggtttgtttttttatgggttgtgttattgtttttttttttgttttatttggaatattttgttttttttttttttgttattatttttttaatggggagtttttttttatagaagaatgatagttaataaatttggaaggagtgatagatttaggtatttttttttttttaatttttagtgtattagttgatttagataaggattattaagaaatggtaaaattattaagtgaagagtatttatgtttttagagtattattttatatatagattatttttttttttttttttttttttttttttttttttttttttttttttttttttttttttttttttttttgagatgaaattttattttgttatttaggttggagtgtagtggtgttatttttgtttattgtaattttggttttttgggtttaagagatttttttgttttagtttttttagtagttgggattataggtgtgtgttattatattcggttaattttagtattttttgtagagataggatttcgttatgttggttagtttggttttgaaattttggttttaagtgatttatatatttttgttttttaaagtgttgggattataggtatgagttattgtttttggttagattatttgttaatgagaaagaaaaaatgttttataaaggcgatagttggtggttatcgttttaattaagtgattaaatttatagttaaaaaaaatgggataatttgatatatgtttttagttgtgttataataagacgtatatagaattatttatatattatttttattaaaaatgttttatttgagtataattatgagttaatattaagataaatttaggttatgaatggatttttataatagaattggtttggattttttaaaaaaaggttaatgttatttaaaataaatattaaagggtaaaggagattttagttcggtgttttttaaattttaatgtgtatatagattatttgaggagtttgttaaaatgtagattcggatttaggagatttggggtgagttttgagattttgaatttttaataaggtttaggattatattttaaaaagtaaagttttagattaaaatagatattattataatatagtatgtgattttagattggtttaaataaataaaaatataatagttatatttataagatatttttgaataagtaaagaaattaaaatatggattatatattattattagatgatattattgaattaatattaatttttttggtaatgataatggtattgtagttagttaagagatgggtattgaagtatatgtgagtgaaaggttatgttgtttttagtttatttttatatttttatatagagagagtaaaaatatagtaagatattgatatagtaatttaggtgttaaggttatattagtatttgttattttatttttttgtaggtttgaatatttttaaaataagattttgggaataagttatgattgttgtaatttttggaagtttggtttttgttttagtttttttataaattttttttttattttaagtagaaatgattttttttttgttttgtggtattttgtgttattttgttcggaatttaagaatttggtgtttgggttttatttgtttaatttaatagagtttttagaagatagggttttgttttttttattggggatttttttatataattttatatagggttcgtttttgggaagatttatagtggatttttttggattgttaaatggaatgaatgttaggtggagggagtattttgggtagtgggaagtgttatggggtattttaaataatttttttttgtgtcgaatttttattagtttaatagggaaggtattatgtttaagaggttaaagaagaggtgtagagttagtaaataagatgtggggttttattgggggtttatatataggggagagagtttagtggtagtgagttgaataggaaaattgttttacggatagaaatgattttatggtagtaggttggataatatatttattttatatatcgtttagtggtggtgggttgggtaggaaaattataattatttgtaaatagtatgtagtttttatagtatgtttatttaatagtttttttttaatggtttttatttggtagtttttatgtaattaaaaatttaggttttaattttttgtatggtttatgttttacgggatgggttgggggtttagatgttttttatagataaggaatgagtttttaggttgattatttttggattttttagtttggaatatttatttagacgtgtttgttatatgtggttattttaagggtatgttttagttattgttatattaggtgtgtttattttatatttttattttgtatttgagtttaaaaataaatttaaaatattatattattattattattattaataattattttttttaaataggtgtttagttttattgttggtgtggagataatttaaaaagagtattattattattatttttaaaaaaagaattttttttgtttataaagggaaaagaggtagttttttttttgaaagtttatcgattgtgaattttatattttaattttttggaatgtaattttttatatttttttttggggttagagaagtttagttttttggtttataaaataaagacgtttttaaggttgagggttttagaggttttttgaaatgtaaatatttatttgtggtgttaatttaggagtttattttattgtttattttattatgtatttttttgttttttgaggagataagagaagttttattttttttttttttgttttgttagattaattgtgtgaaattttattttgattttgtagtttgttgtaggttgtttatttgtatgtataattgtgtttgtttaatagtaaattatttttttttttttatattgatgtaaagaagtgtttgttggtaggatttttaattttttaggggtatattagtataatttttttggagatagattgatatttattgaagcgaaaatgtatattttttttggttaatacggtgaaatttcgtttttattaaaaatataaaaaaattagttaggcgtggtggcgggtatttgtagttttagttattcgggagattgaggtaggagaatggggggaattcgggaggcggagtttgtagtgagtagagatcgcgttattgtattttagtttgggcgatagagcgagattgtttttaaaaaaagaaaaaaagaaaatgtatattttatttttattattaaaaatttattttttagatatatttgtagatacgtatagagggtataaattttagagaaaatattgatgttttttattaggtatagataaattatgaagtatttatatttcgtattatgcgattttttaaaagaatgaaatgaatttttatgtattgatatggaaggatttttaagatatatagtgtgttgttaagtgaataaagtaagatgtaaaattatgggtttattataatgatttatgggtttattatatattataatgtgtattgtgtatttgtagatgtatagatttttggaaggatatataagaatttgttaatggtggttattttcgtgaagagggattagtggttgggtggggaaggtgtgaagatttttattttttttttttttatttgttagttattttttttaaattatgtaagtatagtattttttaatataaatattataaaatatattaatatattataaaatattaaataatataaaatattattttataatataatatttataatataaaatgtttattttataatatatttataatataaaatgtttattttataatatatttataatataaaatgtttattttataatatatttataatataaaatgtttattttataatataaagtaatattattatataaaatagtatttattttataaatatgttggtttaaatgtaaataaaataaaatataattattattgaggttttaaaaatattataggaaagaagtaagttttatagtaatttaaagatagggattttgttgtttttttttaaggttttagaataatgttttgtatatagtagatatttaataaatatttgagatagaaatttaagttttttttttgttttttttaaggagtttaagtttggagttatttgatttttaagttaaattttaaggtaagttttgttgatttttttatattttttttgtttttttttttttgtttttttgtttatgttgttttattggttaggagtgttttttttttgtttttttttttttgtttgtttgaaattgtttatattttttaagttaatttgaaattaatttttaggagttttttttaaatttgtttggaaaaatatattttttttttaatttgtggtgttatggtatttttttaattatttattatatgttatgatttagttgttttaaattttgtttatatacgtgttttgggataagaattgtgtgattttttgtgttagtaaaattatttttatggttttttatttttgtttttattatatatagagtgttaattgattattaatttattttatttttaataatggtgatgtgagtttaagttttttggtttttttttattgattttttttttagagttttttttagagtttttttatttgtttgagttttttttgtttttaagttagtttatattttatttttttataggaaattttttttgataatttaagttaatgggaaaatgatgttttttttttttttgttaggttttataatagttaaggtttgaggaatttattgaaaatgatatgtgtaatgtatttgatattttatatattacggttattattaatatggtaagttttaattttaaggaagtaattgatattttttggtttaagaaattatagtatatcgtattgtataattagattgtatagtgaatttttttatatttaaatatgaggggtaagttaaggaagtggatgtataagaagataaagtttttaagagaagagtgggtgtaatgttttttagtgtttttgtggttgtttgtattggtaaaggggatgttgtttgtattaagtaattaagtagtattggttttattatttttttagggtgacgtagtttaagttttgttttttttttgttttttattttttatatttataaaaatgaggtagaaagatttgttttggtttttttatagaagaaattaatttaattaaaagttggatatgaatgagttttgaagttttttttagttttatatattattatcgttatttatttttttattattttttttttttttttagtagttttagttggattttttaattaaagaattttttaaaggatattttaattttttttttttggttattgttataaaatgatatatttttggtttattttaaattagaattatagaaattgtagagtttttgtagaagaaaagatgttttaaagtgtttttaagattattatatttaatagatgtagataagttattaaattatgagttttaagaattttattatttaaattaaatatttgtaattttttttttttatttttgtagagatatgagttttaaagtttttatttaattttaaagtttgatgatatttgagaaatagatattaaagttttttaaagtttagttttttttagtaattgataagttatagagtatttggtttaagaaaattgaagaaaaattagaataaatttagtaggattataatattacgaaaagtaggtattatgaagtaagaaatagaaatatttttattttggtaggttatgtgggtgggtgtagtttttaaattatttattaataattttattaaaaaatttatgagtaatatatgttattattatagtattttttatataatatatattggtagattttttgtaaatattaattttttaaaatatgaagaagtttttttttttttttttttttttgtttttagaaataaattttattatttattttaaagtaaattttcgaagatagtttgattttgtatagtgtgtatttaacgattgtttagtattgtgaggaatattagagagaataggtgttaaaaattttttaattttttgtttttatgtgttgttttttttttttttttttttgtgacgttttaatttttttaaagttgtggtttaagaggaagttttcgatttgttttgttggttttaatattaaaatgtttaaagttttaagaagttatggttttttttttcgttttttttttttttagattttggtttttgaaatttagttttttgtataaaataaaagtaaaaataaaatttttggtaatgggtgaggttttagaaatttttaggatatttagatttaggatatagaattttagaatttagtttgaagtttttgaagatatgataataatttgtgtaaatgtgttattaggtttttttattgtttttttttttgatatgggtttttggtttattaagatttaaattttaattttaaaaggttaatagtttttttttattgttttgtttagatagatttgtaaagttttaagatgatggtttaataatattttttttaataagttaaattattttagagagttaagtttttttttttttttttttttttttatatatatatatatatataatatatattgtataatataatatatattatgtaatataagtgtattacgttatatagtatatattatagtatatatatatatatagagagagagagtttatttatttaattttattttgtgtttttaattaataaacgaatattatttgtttttagggttttttttttcgggaaaataataagaaaaggaaagggaggaagaggagtttatttatcgttttttgaacgattaatattataatagtggttatcgtgaagataaggtatagagttagagtggttgtggttaaatagaaatagttgcggttcgtggtttttaggtggttggttacggagttcgtcggtatatgtatggttgtgtttttaggaggggttatttcgttgagtgtttgttgtagttttgggtttattttttatatagttttttttatattatattttatttttttttatttgatttagttttgggtttatttttgttttaagaaggattttttttttgaattttgaattatgtgatttggaaaaaaatttttatttgttgtttggtggagaaatttttttttgggggcgtgaggcgagaggcggtagtaagggtgggggagaggtttattttttattgttagggattaagttgtgtgtagagaaattagttatagagaaggtggttgatgttagagggcgcgtaggaaaatgacggtttttcgattgtgtgtgtgtatgtgtgtgtgtgtgtgtgtgtgtgtgtatgcgtgcgtatatataaagtaatttttgtttcgtttagattttgttataaaacgtttttttgtttaagaagttgtatttttttttagcgaggtttgtggtttagaagatttttttagataatgagtttttgttgggttttagggaggtcggatttttcggattgtagtgtaataattttaaagggttcggtttgataggttattgttgaaaaagggatatgttgtaggttttttgggggaaaaagggtatataaatggagatatttttttaaagggggattggtttatggtagtatgaaatttggggtttaaagatattgttagaaagtaggaatttggaaatattaattttttgaataaatatttttgtagaagttttgggatttgttaaattggtagatgaatttggatttgtcgtaaaatttatgaagaggggaaggaattggtagtgagatggtgtggtgtggaatatgggggttgtgtgtgttttgcgtggtgtattatgtagtgtgtgtgtatttgtggtatgggggtatgtgtaggtgttgtgtgttttttatggtatatgtatgtagtgtgtgtgtggtgtgtatttgtgatttgtaatgtatgtcgagtgtggtgcgtatgtaagtgttgtgtgtggtgtgtatgtatgtgttgtgtgtggtgtgttgtgttttgtgtatgtatgtgttgtgtgtgtatgtgattattataattgaatttttattgttttaggtatagcgttaggagttatatgtggttttattttatttttatttttatttttcgaggtaggtaatgtttattttttatagatgggaaaattgaggtttagggaggatgaaaattattttaatttaagtcgtaagtgtcgattattgaaagaatttgggtgtattttgtagtttgtttggttgaaagttcgtgttaagttatttaatttttattgtatttgaaagttaaaatttgaagtgtggttttagttttttttttttttagttttgggttattatataagtttttatggttttttttgtttttaatttgtattatagttattaggaagattaagcgagatgatgttagagtattttatgaataaaaatagatttggggatggtgttggataatttttgttaaatattttaagttgtttattgggttaagtttggaatttagatataatagatagattatttgggggatagagttagattatatttgtggttattaatgatttttattttaaaatatcgtttaaaatgttaattattgtatagttgttgtttttagatgtgggtttttgaaagttttatttggtattatcgtggaagaagtttattttgtatagtatttttttttttttttgtttattttttgtttgtagcgtattattttgagttagtagagattttagatgtttttaaggaaacgttttgtgtttaaagttaagtttggattattattattgttgtttttgtatagaattaaaatttttgagtattttttaaattagattaggttttaggatttggtttggatatttttttttagtgagtttgtaaaagtatagattttggagacgaaagagatattaagagataaattgtttttttgggttaaatagagtggggggcgatatatttattttataattaaggaaatcgaggttttcgtgattttaattgagtttggttttgaaaatagtgtgtttacgttcgtttggttcggtaattaaggtgggaacgaggtaagttagtgttttttggggtatgtatttggttgatttggggagaaggttgtgttttttggtgggtacggatagtgagtgggtagtaagggttttgtggtttgtttagagttgttgagaattagttgtttttttggtttttttgtttagtttttttgattaaagtggaaaatttttgattgttgaatggaagttgtgggtgttgaaaaataaaaaggttttgtttgaagttcgggtttttttgaaggtttgtggggttgagaagggtagtggaaaaaaatgtttgttttatagttattcgttttgtatataatataatgttttgggagggaaggttgataagggggaaaaattattttttgtttttatttaattttttgagtagttgagattttcggattagtttttagtatagtagtttgtgggtttaatttatttttttgttgtgatatttttttatttataaatttttagtggttttttattttttatttttattgttttaagtttttttttgttttttagttgttttagaatttagtttggttaatatagaaatttatgatttgtgttaattggtttttttttgttttttatttaagttgtacgatgtgtagatggaaggagtttttatagaattttttgttgagtaagttttaaattttttttggaagtaaagttgtataaggaatataaaaatataagaaaatagggttgttttggttgaagtataggtgggataaagagaagggttaagttttatttgtttatttgtttttttttggtatggggtttttttaaggtgaataaaatttagaaattttagaaaatttggtttgaattttttattttataaaaggaggaaattgggatatagaaatgggaataattaaaggaagtatatattattagggagagagataggtgtaagagttttttttgtttattttttttttttttttttttttttttttttttttgattgagtttcgttttgttatttaggttggagtgtaatggcgtaatttcggtttattgtaatttttgttttttaggtttaagtgatttttttgttttagttttttgagttgttgggattataggtatatatttttaggtttggttatttttttttttttttaattttttgtagagatagggttttattatgttggttaggttggttttgaatttttgatttcgtaatttgtttgtttcggttttttaaagtgttgggattataggtatgagttatcgtatttaattttttttgtttgttcggttttttttgtttatttttatgtcggttttgttaatattttaggtgtatttaggttttttttcgtgttttatttggttttttattgtttttgtttttttttttttttttagtttttgttaattcgttttattatttttaggaatgtttgtttagattttttaagtttattaatattttttttggaatgtttttatttttatgttatataatttaattgtttaattatttattttttttgatgtggaatttaagtgtgtaaatatatgtaaatgttgttttgtttataagatgagagtttttgagggcggtttgtatttttttagttttttaagtttttgtattttattttgcgttttttgttgttggttatatatgtagggttgatttttaatttatgttttatgtttatggaaagagaaagttttagaagagtggtttatgtaaaggaattgtgtggtggtatttttgtttttttttttttaattgtatttcgtgtttttatttttttttagagaatggttttatgagagtgattatttagtttttttttagtttggaattggttgttgagatgtggttgtagtgtttgagatttagtgggtaaatagaattaacgttttatttttttaagaaggaaagttattttgaaaagtaaagggaagttagtagtagttatttttttaatattgtttttttgtataagggattgggagatttttgttgtagagattagaggtttttaggtgtaagtttatattagtagtggtagtagtagtatttgggaatttggtgttattttaagattttttagatttattttaatttagaaatttaggttggggtttggtagtttgttttaataaagtattttagggaatgtagatgtttgagattatttgaaaaatattgatttagggaaataatttttaagagattatttggtttaaaatttagtttttggataggtaaattattatttttattgtgtaggtagggaaattgaggtataataaaagttattgtttggggttatgtagttgggttatgttggtttatagattagtttttttgttttttttattgagttttttttttaattttgattacggttgtaggttttagaaatatttttagaatttttttggaatgtagatatatttggaatagaatggagatattttattttatttaaaaattattagattggtgtaaaagtgattgcggtttttgttattaaaagtaatttaataattttatttatttaagattattttttgatgattattgtatatggtaggaatatatatttttaaattatgggtatatgtgagataaggatagatttatttagggtatatttaagtaataatatatgtaattaaatggttttttgaggagggagggttttgtttttttaattttagagttttttgttttgttggggttaatttgaagagattggatgttggagtcgagttatagtgatattttattgagagggtttagtgaggataggggtagtgggaggaagatttggaatagggttagtaaattgaattataggttaaatttggtaggtatttatttttgtaattgaagttgtattgaaatgtaattatatttttttgtgtatatatttatggttttaattttattataatagtaaatttgagtggttttaatagagattttatagttgtcgaagtttaaaatatttgttatttagatttttataga

SEQ ID NO: 499 - DNA, 14708 bp, Artificial Sequence
  chemically treated genomic DNA (Homo sapiens)
ggttgtatttttttgtttttatttttttgttttttttatttgttttagtttggttatattagtattttgggttttttgttttgtgtttgtttgtttgtttgtttgtttgtttgtttgttttgggatggagttttattttgttatttaggttggagtgtagtgatatgattttggtttattgtaatttttattttttgggtttaaatgatttttttgttttagttttttaagtagttgggattataggtatttattattatatttagttaatttttgtatttttgtagagatgaggttttgttatgttggttaggttggttttaaatttttgattttaggtgatttgtttattttagttttttaaagtgttgggattataggtgtgagttattgagtttagtttgttttgttgttttttgagatggagttttattttgtcgtttaggttggagtgtagtggtataattttgtttgattgtagtttttattttttgagtttaagagatttttttgttttagttatataagtagttgggattataggcgcgtgttattatatgcgtttaattttggtatttttagtagcgatggggttttgttatattggttaggttggtttcgaatttttggttttaagtgatttgtatatttcggttttttgagtagttgggattataggcgtgagttattatgtagggtttttttggttttttaacgtataaagttattttttagttttgggtgtttatagtattattgttagtttttggaaagttttttttagaagtttttatatgattgattttttatttttttttaggttttagtttaaatgttttttttttagagagtttttttttgattattttatgtaatgtgtttttttttagttagtttttttttattttgtgtattttttttagagtatttattattattttggttttgatgtttgttggtttatatgtttgttgtttgttttttatatagaaagtaaattagttttttatttgttttgtttattattttattttagtatagtgattaatatatattagtagttaattaataaatagttataagttaggtacggtgatttatatttgtgattttcgtattttgggaggttaaggtgggcggattttttgaggttaggaatttgatattagtttgtttaatatggcgaaatttcgtttttattaaaattataaaaattagtcgagtgtgatggcgtgcgtttgtaatattagttatttgtgaggttgaggtaggagaatcgtttgaattcgggaggtagaggttgtagtgagtcgagattatattatagtattttagtttgggtgatagagtaagattttgttttaaaaaaataagaaatagaaatatatatatgttgttataagaaatttattattttttagtaaaaaatatagatttttaattaaagaaaggggaaatttttttttaaataattttagaattcggggtagaaaacgttatatgtggaaattcgttttgaaaaatagtttcgtttgtgaataggaaatatttggattatattttttttatttttacgaaggatttaaatgtgtagtattgatgaagaggtagttagttttagtttttattatttttgtatattttatttgtttttttttatggtatagttttgggggtaggttataaattcgtaagatgttattagtattattggttaagatgtaggaatcgttaggagttttagaaataggggagagttagaaagttggttagatttatgttttttaagtgtagggttagggttgagtttgtttttggggtaggtaagtttttttgaatttttgagggaagtagaagatataaattgttagataaaatgtaagtttagtttaaaagggttacgtgtcgttttttttagttttggggtattttttttttagaaaattggattgttttatagtgaaaatttcgggggtggttagttttttgtttcgttgttatttttattatttatagttttttaagaagtttttaggttgggtgttgaattttgattaggaattattgagaaatcgaggtagttgggagaagttgtagttttaagcgttgaaaggaagatgggggataataaatttgggtcgttaagtaaagggggtagaggtttggagaagtgggttttaggattagaggatagatcgattttatattttatttttttagattttatattttattgttattattatttacgtgtttttttcgttttttgtagcgggttttttagaggtattttttatggtttttttagattttaattttggttcgttcgttttttttttagaaaggttttcgtttgttttttttgtaggaaggtttgtatttttagaaagtttttgtttttcgattcgaggatttaatttattaggggaattaaattttgtttttaggggagtggagagagaaattgggtttttttttcgtagtttttgggatatagttgagttagttataggatttggggataatcggggcggattttttttttcgggaggcggtggtattagtttagagttcgtatttttatttatcggggaagcgtggggagaaggatgggttggagttgggttttggtttgaaggatagtagttcggagttaacggttgagtttttaaagtttttatattgtagaggaagtatagcggagattagttttagttaggatggtttcgaagtttttagggattcgacgtagagttaaagaaatttatttgtgtttttttttttttttgggagtaggtagaagattttcgggaggagaggcgaatagcggacgttaatttttttgaaagtattgtgttttttagtatcgcgggtcgttacgggttttttgttgtcgcgggatttcggtttatttttcgattgggtcgtcgtatttcggattagatttcgcgggcgatttacggaattcgcggagtcgggacgtgaaaggttagaaggtttttcgtttttattaagttttagggtttttcgtggttgttgggagttgtagtttgaacgtttttattttggcgagaagcgtttacgttttttttatcgagtttcgcggtaatttttaaagtatttgtatcgttttttcgtcgtttgtagagggcgtagtaggttttgtattttttttgtattttattttttaggttttagatttgttttttttatttaaaaaatatttattatcgagtttttatttgttatttagtattgatataggtatttaggaatataataatgaataagatagtagaaaaattttatatttttataaggtttacgtttttatgtattgaaagtaatgaataaataaattttattagagtgataagggttgtgaaggagattaaataagatggtgtgatataaagtatttgggagaaaacgttagggtgtgatattacggaaagtttttttaaaaaatgatattttaattgatgagaagaaaggatttagttgagagtaaacgtaaaagtttttttttttttattttttatatttgatataatgtaggatttttttaaaatgatttttattaattttgtttttatagttttggtttgtagaattttttattttaaaatgttagtatttacggtattaggtcggcgagaattttgattttgtatttttttttttaattttattttttttgtttttttcggtaggcggattatttgtttttatttgttatggcgattgtttagttttgtgttaggagtttcgtaggggttgatgggattggggttttttttttttatgtgtttaagattggcgttaaaagttttgagttttttaaaagtttagagttatcgtttagggagtaggtagttgttgggtttcggggatattttgcgttcgggttgggagcgtgttttttacgacggtgatacgtttttttggattgggtaagtttttgattgaatttgatgagttttttttgagttacgggttttcggtttcgtgtatttttagttcgggaaaatcgttggggttgggggtggggtagtggggatttagcgagtttgggggtgagtgggatggaagtttggttagagggattattataggagttgtattgttgggagatttgggtgtagatgatggggatgttaggattattcgaatttaaagttgaacgtttaggtagaggagtggagttttggggaattttgagtcggtttaaagcgtatttttttgtatatttattcggtgttgggcgtagggaatttttgaaataaaagatgtataaagtattgaggtttgagatttttggatttcgaaatattgagaatttatagttgtatattttagagtttatggtattttagtgaaaattggggttttatttcgaaatgattatttgggggtgattcggggagtttaagttgttaaggttttataattttcggatttttgttttttttggagcgatttttttaggtagttttcggtttcgttagatggagaaaatttaattgaaggttgttagtcgtggaagtgagaagtgttaaattaggggtttgttcgttaggtcgaggaggatcgtcgtaatttgagaggttcggtagttttgttattgtttggttttatatttatatttttgttttttgtagtagtattttcggtttttttttgtcggagtagtttattatttattcgatgagaggggaggagagagagagaaaatgttttttaggtcggttttttttatttggtagagggaggttgttatttttcgtttgtatttttttttttggattatttagttatggtttttgtaaaggtaggggtatttgttttgatgtaaattttaatttttttttttttttgaatggtgtgttttatttcgcgggtcgtttgtaatttaggcggacgttattatggcgtgagatagggagggaaagaagtgtgtagaaggtaagttcggaggtatttttaagaatgagtatattttattttttcggaggaaaaaaaaaaagaatgggtacgtttgagaattaaattttgaaagagtgtaatgatgggtcgtttgataatttgtcggaaaaataatttatttgttatttagttttgggttaggttattttagttttagacgtaggttgaacgtcgtgaagcggaaggggcgggttcgtaggcgttcgtgtggtttttcgtgtagtttttcggttcgagtcggttttttttggtaggaggcggaattcgaatttatttttttcgttgttttattttttagttcgcggttgttttatttcgtagtttttttttatgtatttgtcgcgtatcggttattttgtgtcgtatttacgttattttttttttaaatcgaggtggtatttatatatagcgttagtgtatatagtaagtgtataggaagatgagttttggtttttaatcgtttcgtgatgtttattaagttatagattttttttatcgttttagaaacgttttattacgtttttttttagtcgattttcgattttatttttattttgatttttataattattttgtttgttggagaattttatatagaatggaattaggttgggcgttgtggtttacgtttgtattttgggaggtcgaggcgggcggattatttgaggataggagttttagattagcgtggttaacgtggtgaattttcgtttttattaaaaaatataaaaattagttgggcgtggtgggtgtttgtaattttagttattcgggagggtgaggtaggagaatcgtttgaattcgggaggtagaggttgtagtgagttaagatcgtgttattatattttagtttgggcgataagaacgaaatttcgttttaaaaaaaaggggggaattatatattatgtgtttatttttgtcgggtttttgttttttaatgtattgtttgatattcgtttatgttgtatatattagtattttgtttttttttatttagtatagtttatcgattgtatattcgtttttttgatggttttttgagttgttttttatttgcggttatgaaataaagttgttataaatatttttgtataattttttttgtgattatatgttttcgtgttttttggagaaatatttaggaggggaattgcgagtttggaagtaaaaagtagttgtattttgaatttttttagaagttttgagttttttagagcggttgtattattttatattttaattagtaaggtatgggagttattatggttgtgttatagtttttcggatattaggtattgttagtttttttaatgtggtatatttttgtggttgtaatttatagttttttattgattaaggatgtttagtatttttttatgtgtttattggttattcgtattttgtttgtaaagtagtttttcgagttttttatttgttattttggttttttgtttgtttttattgtttagttgtgggattgttttatatattttggatataagttttttattagatttatgtgtcgtgaatgtttttttttgatttgttgtttgtttatttgtttgttttatagagtttatagtattttaagaggagtggatttattttttttatgtttagtatttgttttgttttgtttaggatatttttttttttttttttaattttagggttatgaagatattattttatatttttttttaggatttttatggttgtaagttttatagtaaggtttttgagttattaattaatttttaaaattaattgtttatggtgtgaggtgtaggagttagtttttggtattttttttgtatggaaatttagttattttgtttttatttgttgaaataggttttttttttttattgaatgtttttaattttaattattttatagttggagtatagggttattattttagtgttattttttttttttttttgttaatttttgagatagggatttatattgttgtttaggttagagtataatggtataattaaggtttattgtagtttcgaatttttgggtttaagtagttttttagtagttttacgagtagttgggattattttattatatttagttaattattttatttttttgtattgataggattttattatgttgtttaggttggttttaaattgttggttttaagtttttattttatttcggttttttaaagtgttgggattataggtgtgagttattatgtttgattttttagtgttattttttatttattttttttgttttttgttttttttaaacgttggaggaagaaatagtatttattttatataaattttttagaaaatagaggaatagattgggcgcggtggtttatatttgtaattttagtattttggtacgttgaggtaggggattatttgaggtcgggagttcgagattagtttggttaatacggcgaaattttatttttattaaaaatataaaaagtagttaggcgtggtgatatatatttgtaatgttagttatttaggaggttgaggtataagaattttttgaatttgggaagcggaggttgtagtgagtcgagattgcgttattgtattttagtttgggtaatagagtgagattttgttttagaaaaaaaaagaaagaaagaaaaaatagaggaatattttttaatttgttttcgaagttagtataattttggtattaaaattaaataaggatattataagaaaagaaaatatagattaatatttttgttagtatagatatgtaatagttaattaattttagtaaattaaatttggtaatatagaaaaaaggataaataggttagtcgcggtggtttacgtttgtaattttagtattttgggaggttgaggtaggtagattatttgaggttaggagtttgagattagtttgattaatatggtgaaatttcgtttttaataaaaatataaaaattaggttgggtacggtggtttacgtttgtaattttagtattttgggaggtcgaggtgggtagattacgaggttaggagtttaagattagtttgattaatgtggtgaaacgttatttttattaaaaatataaaaattagtcggtgtggtggtatttgtttgtaattttagttatttaggaggttgaggtagaattgtttgaattcgggaggtagaggttgtagtgagttaagatcgtgttattgtattttagtttgggcgatagagtaagattttattttaaaaaaaaaaaaaaattagttgggtatggtggtgggtatttgaaattttagttattcgggagtttgaggtaggagaatcgtttgaatttaggaggtagaagttgtattgagttgggattatattattgtattttagtttgggtaatagagtgagattttattttaaaaaaagaaaaagaaaaaggataaatatattttaattaaataatgtttattttatgattgtagttgatttaatatttaaaaattggtttggtgtagtagtttaggtttgtaattttaatattttaggaggttgaggtaggaagattttttgagtttaggattttaagattagtttgggtaatatagttagattggtttttattggggggaaaaaaattagtttgtgtaatttattatattaataaagggaaatataaaaattttatgattattttaatagatgtagtaaaagtagttaatgatatttaatatatatgtatgattataaattaattaattttttagtaaattagggaaaggaaatttaatttagtttgataatagggcgtttatagtcggagttttattagtagtatatataatggtagaaaatttagtgttgtcgggcgcggtggtttacgtttgtaatgttagtattttgggaggtttaggcgggcggattacgaggttaggagatcgagattgttttgattagtatgttgaaatttcgtttttattaaaaatataaaaataaaaaattagtcgggtatggtggcgggcgtttatagttttagttattcgggaggttgaggcgagagaatggcgtgaattcgggaggcggagtttgtagagtttagatcgtgttattgtattttagtttgggtgatagagtgagatttcgttttaaaaaaaaaaaaaaaaaaaaaagaaaagaaaatttaacgtttttttttttaagattaggaattagaaaaggatttgatttttataacgttgatattatattggaggttttaattaggtaagaaaaagaaataatgagggtcgggtgcggtggtttaggtttgtaattttagtattttgggaagtcgagacgggtggattacgaggttaggagatcgagattattttggttaatacggtgaaattttgtttttattaaatatataaaaaattagtcgggcgtagtggcgggcgtttgtagttttagttattcgggaggttgaggtaggagaatggcgtgaatttagggggcggagtttgtagtgagttgagatcgagttattgtattttagtttgggcgatagagtaagattgtgttttaaaaaaaaaaaaagaaaaagaaataatgattagtggttcgatgttttacgtttataattttagtattttgggaggtcgaggtgggtagattatttgaggtttggagttggagattagtttgataaagatggtgaaatttcgtttttattaaaatattaaaaaaatagttaggcgttggtcgggtatagtggtttatgtttgtaattttagtattttgggaggtcgaggtgggtggattatttgaggttaggagtttaatattagtttggttaatatggtgaaattttatttttattaaaaatataaaaattagtcgggcgtagtggcgggcgtttgtaattttagttatttgggaggtttaggtaggagaatcgtttgaatttgggaggcggaggttgtagtgagtcgagattgtattattgtattttagtttgggtgataaaagtaaaaatttcgttttaaaaaaaaaagaattagttaggggtagtggtgaacgtttgtagttttagttatttaggaggtagaggtaggagaattatttgaatttaggaggtagaggttgtagtgagtcgagattgttttattgtattttagtttaggcgataagagtaaaattttatgttaaaaaaaaaaaaaaaaaaggaaagaaaaaaaataacgattagaaaggaagaaataaaatatatttatagttagtatgattttatatatatatgttttaatggggttaggcgtggtggtttatgtttgtaattttagtatttttaggaggttgaggtaggtggtttttttgggattagtttggttaatatggtgaaattttaattttaataaaaatataaaaaattagttaggcgtggtgacgggtatttttaattttagttatttaggaggttgaggtaggagaattgtttggatttgggaggtagaggttgtagtgagtcgagatcgcgttattgtattttagtttgggtaataagagtgaaatttcggtagggtgtggtggtttacgtttgtaattttagtatttcgggaggttgaggtaggtcgattatttgaggttaggagtttgagattaatttaatatggtgaaatttcgtttttattaaaaatataagaattagttgggtgtagtggtgggcgtttgtaattttagttatttgggaggttgagatagaagaattgtttgaatttaggaggtggaggttgtagtgagttgagattatgttattgtatattacgtcgggtaatagagcgagatttcgttttaaaaaaaaaaaaaaagagtgaaattttattttaaaaaaaaaaaaaagttttaatggaaaatttataaaaagttattaaaattaataaataaatatagtagggttgtaggttatagggtaatatagttatttttttatttgtaggggtttggttttgggattttttatatattaaatttatagatgtttaagttttatatataagacggtatagtatttggatttaatttatatatatttttttatatagtttaaattatttttagattatttatattatttttatataatgaaaatgttaatgtatatgtaagtatgtatgtaagtatttgtattatattgtttagggaattattggatatataggtttttaagattgatattagtagttattgttaagattttggttaggtttgtttttgtttggggttttagttgattttattgtttttttatttagttaagggtatttgtattttttttggttttttggttatttggaaggtttagtttagtttggtatatttgtattttggtttattgatgttggtatttttgggaaggttttgttttgaaaaatacggagattttagttgttattgaagatttgagagataaagatagggagatttgtttgtagatttgtgtttttttaagtgggattgagattttgggttttttattttaggatagtattttttggtttgttgattgaatagatttttgaaggaggtgtatttgtattaatggagtgggggtgggagtagtattatagattcgtattaataattatatagttttttttagaataataatatagaataagtgaaatagaataattgtagaaagagttaatttttgttgagtttttattgtgtgtttagtattttttttaattttatattttttataatatatagagtattaggtaggttaggtttggtggtttacgtttgtaattttagtattttaggaggttaaggggggtggattatttgaggtcgggagtttaagattagtttgattaatatggtgaaatttcgtttttattagaagtataaaattagttaggtgtggtggtatatgtttgtagttttagttatttagtaggttgaggtaggagaattatttgaattcgggaggaggttgtagtaagcggagatagtgttattgtattttagtttgggtaataagagttgagatttcgttttaaaataaaataaaataaaataaaataaaataaaataaaataaaaaaagaaaagagtttgttattaaaggagttgtttggtaggggatgttttgttagtgtaaataatagaaaagtgggttgggtatagtggtttatgtttgtaattttagtattttgggaggttaaggcgggcggattatttgaagttgggagtttaagattagtttgattaatatggagaaatttcgtttttattaaaaatataaaattagtcgggcgtagtggcgtatgtttgtaattttagttattcgggaggttgaggtaggagaatcgtttgaatttgggaggtagaggttgcggtgagtcgagatcgtattattgtattttagtttggacgagagtaaaattttgttttaaaaaaaaaaaaaaatagaaaagtgtaataaatatttatagtaggtatgttttttagtaaatttgatgataaatttggtataaagaaagagagtatttttgaaaaaaaaaaaaagaaaaagaaagagagtattttgtttgggtaatatagtgaaattttgtttttataaaaaaatttaaaaattggtcgggtgtagtggtttatatttgtaattttagtattttgggagtcggaggcgggaggattatttgaggttaggagttcgaaattagtttggttaatatggtaaaattttatttttattaaaaatataaaaaattaattaggcgtattggtgggcgtttgtaattttagttatttaggaagttgaggtaagaggatcgtttgaatttgggaggtggaggttatagtgagtcgagattatattattgtattttagtttgggtgatagggcgagatttcgtttttaaaaaaaaaaagaaaaagaaaaagattaaaaaattagttaggtaggtttttgtggttttagttatttgggaggttgaggtaggagaattattgagtttaggagttcgaggttgtagtgagttatgattgtattattgtattttagtttgggtaataaagtaagattttgttttaaaagaaaaaagaaagaaagaaagaatatggcgggttaggtatagtggtttatatttgtaattttagcgttttgagaggtcgaggtaggtggattataaggttaggagttttatattagtttggttaatatggtgaaattttgtttttattaaaaatataaaaaattagttaggtatggtggtaggggtttgtaattttagttattcgggaggttgaggtaggagaattgtttgaaattagaaggtagaggttgtagtgagtttagattgtattattgtattttagtttgggcgaaaagagttaaattttattttaaaaaataaataaaaaaataaaataaaagaaaatatggtaaagtttttgaaagtttgtttgggagaaggtgcgatgatagttgtataatttcgtgtaagatgttggtttatataggggttgttttttgttttttttcgtttttttaattttttatataataggtttgtgtgttatttatatttattgagtttaagtaggtgtaaggtattgtgatttaatattttggttagtaagataataagatagattattgttttgtttttaggaagtgtatatgttattagaggaaatagataaaataaataaggaaaagtattagataatgtaagtgttatgagaatgtaaatgaggtgatgtgaattaaaataggatgatttaaagtttgtacgggaaggagtttatttttatgtttttggttagttaaggaattattagttgattagtagagaagggtagttagtttagttagagtttttggggaagagggagtggttgttaagagatgagattaaagaagtcgagacgggttattcgtgaggggtttgtaatgtagggttgaggagtgttcgaagagaatgggtaggtgagcggtgagatagttgtttttttagaagttttgtagtgaaaggaattaaagaaatggagtcgtgtattaggtggggaagggtgggggttaagggggtgtttttttttatatagagattgtaggttgagaatgattatatttttgttaataggaggtgggagtagggtacggtagtttatatttgtaattttggtattttaggaggttgaggcgggtcgattatttgaagtaaggagttcgagattagtttggttaatatgtaaagttttgtttttattaaaaatataaaaattagttgggtgtggtggtattcgtttgtaattttagttattcgggagattgaggtaggagaatggtttgaattcggaaggtagaggttgtagtgagttgagattatgttattgtgttttagtttaggtgatagagagagattttattttaaaaaaaaaaaaaaaatataggaagggagttgggaatagggtgtatatttaggaagttttggggatttagtggtgggaaggttggaagtttttttttgattgttttttttttaaagaagtgtatggttggtgaggggtggggtaggagtgtttgggttgtggtgaaatattggaagagagaatgtgaagtagttattttttttttgttttataggaagtcgagttgttttagatattggtatggtgttgggggagggggttttttttttgtaggtttaggtgatttagggttggaagtgttttatgttggatttttatttttttttttgtagt

SEQ ID NO: 500 - DNA, 14708 bp, Artificial Sequence
  chemically treated genomic DNA (Homo sapiens)
gttgtaagaggaaaagtggggatttagtatgagatatttttaattttgggttatttgggtttgtagagaaggaatttttttttttaatattatgttagtgtttgagatagttcggttttttgtggagtaggaaaagaatggttgttttatatttttttttttaatgttttattataatttaagtatttttgttttattttttattagttatgtatttttttgaggaaaagataattagagagggatttttaatttttttattattaaatttttaagattttttaaatgtgtattttatttttaattttttttttgtattttttttttttttttgagatggagtttttttttgttatttaggttggagtatagtggtatgattttagtttattgtaatttttatttttcgggtttaagttatttttttgttttagtttttcgagtagttgggattataggcgagtattattatatttagttaatttttgtatttttagtagagatagggttttgtatgttggttaggttggtttcgaattttttattttaggtgatcggttcgttttagttttttaaagtgttaagattataggtgtgagttatcgtgttttgtttttattttttgttaataaggatatagttatttttagtttgtaatttttgtatggggaaggatatttttttggtttttatttttttttatttgatatacggttttatttttttgattttttttattgtaaagtttttggaagaataattgttttatcgtttatttgtttatttttttcggatattttttagttttgtattataaattttttacgaatggttcgtttcggtttttttaattttattttttaataattatttttttttttttaaaagttttagttagattggttgtttttttttgttaattaattggtggttttttggttagttaggaatatgggggtaggttttttttcgtgtagattttaagttattttattttaatttatattattttatttgtatttttatagtatttatattgtttgatatttttttttgtttattttatttgttttttttaatagtatatatattttttaagggtagggtagtgatttattttgttgttttgttgattaaagtattagattataatgttttgtatttgtttgggtttaataaatgtgaataatatataagtttgttatatgagaggttaagagagcgagaaagagtaaggggtagtttttgtgtggattagtattttgtacgaagttatgtaattattatcgtatttttttttagataagtttttaaaggttttgttatgtttttttttgttttgtttttttgtttgttttttgagatggagtttggtttttttcgtttaggttggagtgtagtggtgtagtttaggtttattgtaatttttgttttttggttttaagtaatttttttgttttagtttttcgagtagttgggattataggtttttgttattatgtttggttgattttttgtatttttagtagagatagggttttattatgttggttaggttggtgtggaatttttgattttgtgatttatttgtttcggttttttaaagcgttgggattataggtgtgagttattgtgtttggttcgttatgttttttttttttttttttttttttttgaggtagggttttgttttgttgtttaagttagggtatagtggtgtaattatggtttattatagtttcggatttttgggtttagtgatttttttgttttagttttttaagtagttgggattatagaggtttgtttggttaattttttagtttttttttttttttttttttttttggagacggagtttcgttttgttatttaggttagagtgtagtggtgtgatttcgatttattgtaatttttattttttagatttaagcgatttttttgttttaattttttgagtagttgggattataggcgtttattaatgcgtttgattaattttttgtatttttagtagagatggggttttgttatgttggttaggttggtttcgaatttttgattttaggtgattttttcgttttcgatttttaaagtgttgggattataggtgtgagttattgtattcggttaatttttgagtttttttgtagaggtagggttttattatgttgtttaggtaggatgtttttttttttttttttttttttttttttagggatgttttttttttttatgttaaatttgttattagatttgttaagaaatatgtttattgtaagtgtttgttatatttttttgtttttttttttttttgagatagagttttgttttcgtttaggttggagtgtaatggtgcgatttcggtttatcgtaatttttgttttttaggtttaagcgatttttttgttttagtttttcgagtagttgggattataggtatgcgttattgcgttcggttaattttgtatttttagtagagacggggtttttttatattggttaggttggttttgaatttttaattttaggtgattcgttcgttttggttttttaaagtgttgggattataggtatgaattattgtgtttagtttatttttttgttgtttgtattgataaaatattttttattaaatagtttttttaatggtaggtttttttttttttttattttattttattttattttattttattttattttattttgagacggagttttagtttttattgtttaggttggagtatagtggtattattttcgtttattgtaattttttttcggatttaaatgatttttttgttttagtttgttgagtagttaggattataagtatgtgttattatatttggttaattttgtatttttagtagagacggggttttattatgttggttaggttggttttgaattttcgattttaggtgatttattttttttggttttttaaagtgttgggattataggcgtgagttattaagtttggtttatttagtattttgtgtattatgggaaatgtagagttgaggaaagtgttgggtatatagtaagagtttaataaaggttagttttttttgtaattgttttattttatttgttttatattattattttagagagaattgtgtgattgttagtgcggatttgtggtattgtttttatttttattttattaatgtaagtatattttttttagggatttatttagttaataggttaggaggtgttgttttgaaatggggggtttaaagttttaattttatttggagggatataggtttatagataggtttttttgtttttattttttaaatttttagtagtaattaaaattttcgtgttttttagagtaggatttttttaggggtattagtattagtgggttaggatataaatgtgttaggttgaattaggttttttaaatggttagggagttaagagaaatgtaggtgtttttggttgggtgggaaggtaatgagattaattgagattttaaataggggtaggtttgattagaattttaatagtggttgttggtattagttttgaaggtttatatgtttagtgattttttaaataatatagtataagtatttatatatatatttgtatgtatattagtatttttattgtatgggggtaatgtaagtaatttagagataatttaaattatatgggaggatatgtgtaggttaaatttaaatattatatcgttttatatatgggatttagatatttgtgggtttggtgtgtgaggagttttagaattaagtttttatagatagagggataattatattgttttgtaatttgtaattttgttatatttatttattagttttggtagttttttatggattttttattaggatttttttttttttttgagatagagttttattttttttttttttttttgagacggaatttcgttttgttgttcggcgtggtgtgtaatggtatgattttagtttattgtaatttttattttttgggtttaagtaatttttttgttttagttttttaagtagttgggattataggcgtttattattatatttagttaatttttgtatttttagtagagacggggttttattatgttaggttggttttaaatttttgattttaggtgatcggtttgttttagtttttcgaagtgttgggattataggcgtaagttattatattttgtcggagttttatttttgttgtttaggttggagtgtaatagcgcgatttcggtttattgtaatttttgttttttaggtttaagtaatttttttgttttagttttttgagtagttgggattagaggtgttcgttattacgtttggttgattttttgtatttttattagagttggggttttattatgttggttaggttggttttagggaagttatttgttttagttttttaaaagtgttaggattataggtatgagttattacgtttggttttattaggatatgtatgtatagaattatattggttgtgaatgtgttttatttttttttttttaatcgttattttttttttttttttttttttttttttttttgatatggaattttgtttttgtcgtttaggttggagtgtaatgggataatttcggtttattgtaatttttgttttttgggtttaagtgatttttttgtttttgttttttgagtagttgggattataggcgtttattattatttttggttaatttttttttttttgagacggagtttttgtttttgttatttaggttggagtgtaatggtgtaatttcggtttattataattttcgttttttaggtttaagcgatttttttgtttaagttttttaagtagttgggattataggcgttcgttattacgttcggttaatttttgtatttttagtagagatggggttttattatgttggttaggttggtgttgaatttttgattttaggtgatttatttatttcggttttttaaagtgttgggattataggtatgagttattgtattcggttaacgtttggttatttttttaatattttaatagagacgaggttttattatttttgttaggttggtttttaattttagattttaggtgatttgtttatttcggttttttaaagtgttgggattataggcgtgagatatcgggttattaattattatttttttttttttttttttttttgagatatagttttgttttgtcgtttaggttggagtgtagtggttcgattttagtttattgtaagtttcgttttttgagtttacgttatttttttgttttagtttttcgagtagttgggattataggcgttcgttattacgttcggttaattttttgtatatttagtagagatagggttttatcgtgttagttaggatggtttcgattttttgatttcgtgatttattcgtttcggttttttaaagtgttgggattataggtttgagttatcgtattcggtttttattattttttttttttgtttggttaaaatttttagtatggtattaacgttgtgagagttaaatttttttttagtttttgattttagaggaaaaagcgttgagttttttttttttttttttttttttttttttttgagacgaagttttattttgttatttaggttggagtgtagtggtacgatttaggttttgtaagtttcgtttttcgggtttacgttattttttcgttttagtttttcgagtagttgggattataggcgttcgttattatgttcggttaattttttgtttttgtatttttagtagagacggggttttagtatgttagttaggatagtttcgattttttgatttcgtgattcgttcgtttaggttttttaaagtgttggtattataggcgtgagttatcgcgttcggtagtattgagttttttattattatgtatgttgttagtggaatttcgattgtggacgttttgttattaaattaggttaagttttttttttttagtttgttaggaggttggttggtttgtaattatgtatatgtgttgaatattattaattgtttttgttatatttgttgaaatgattatagggtttttatgtttttttttgttaatgtggtgaattatatagattgatttttttttttttagtaaagattagtttgattatgttgtttaggttggttttgaaattttgggtttaagagatttttttgttttagttttttaaaatgttgggattataggtttgagttattgtattaggttaatttttgaatgttgaattagttataattatgagataaatattatttggttagaatgtatttattttttttttttttttttttttgagatggagttttattttgttgtttaggttggagtgtaatggtgtgattttagtttagtgtaatttttgttttttgggtttaagcgatttttttgttttagattttcgagtagttgggattttaggtgtttattattatgtttagttaatttttttttttttttgagatgaagttttgttttgtcgtttaggttggagtgtagtggtacgattttggtttattgtaatttttgtttttcgggtttaagtaattttgttttagttttttgagtagttgggattataggtaggtgttattatatcggttgatttttgtatttttagtagagatggcgttttattatattggttaggttggttttgaatttttgatttcgtgatttgtttatttcggttttttaaagtgttgggattataggcgtgagttatcgtgtttagtttgatttttgtatttttattagaaacggggttttattatgttggttaggttggttttaaatttttgattttaagtgatttgtttgttttagttttttaaagtgttgggattataggcgtgagttatcgcgattggtttatttatttttttttttatattattaggtttggtttgttaaaattggttagttgttgtatgtttatgttaataggaatattggtttatattttttttttttataatgtttttgtttggttttggtattaggattatgttggtttcgaaaataagttgggaaatatttttttattttttttttttttttttttttttttgagatagggttttattttgttgtttaggttggagtgtagtggcgtaatttcggtttattgtaattttcgttttttaggtttaagggatttttgtgttttagttttttgagtaattggtattataggtatgtgttattacgtttagttattttttgtatttttagtagagatggggtttcgtcgtgttggttaggttggtttcgaattttcgattttaaatgattttttgttttagcgtattaaagtgttgagattataggtatgagttatcgcgtttagtttgtttttttgttttttgaagagtttgtgtaagatgggtattgtttttttttttaacgtttaaagagagtagagaatagaggagataaatagaaaatagtattaagaggttaggtatggtggtttatatttgtaattttagtattttgggaggtcgagatgggatgaaagtttgaggttagtagtttgagattagtttgggtaatatagtgagattttgttaatataaaaaaataaaatagttagttgggtgtggtggagtaattttagttattcgtgaggttgttagaggattgtttgagtttaggggttcgaggttgtagtaagttttgattgtgttattgtattttagtttgggtaatagtgtgagtttttgttttaaaaattaataaagaaaaaaagaaaatagtattaaaatggtagttttatattttaattgtaaaataattaaaattaaaagtatttagtagagaaaggaagtttattttaataagtggagatagaataattggatttttatataggaaagatattagagattgatttttatattttatattataaataattaattttaagaattaattaatggtttaaggattttattgtaaaatttataattataaaggttttaaaagaaaatgtaagataatatttttatgattttggggttaaaaaaaaaaaaaaagatgttttaaataggataaggtaaatattgaatataaaaaagataaatttattttttttaagatattgtaaattttgtaaagtaaataaataggtaagtaatagattagaagaaaatatttacgatatatggatttgataaaggatttgtatttagaatgtataaagtagttttataattgaataataaaaataaataaaaaattaaaataataggtaaaagattcgaagagttattttataaataaaatacgaatggttaataggtatatgaaaaaatgttgaatatttttagttaatagagaattgtaaattataattataaggatatattatattagaaagattgataatatttaatgttcggaaggttgtggtataattataataatttttatattttgttagttggagtgtaaaatggtataatcgttttggaaaatttagagtttttgaaaaagtttaaaatatagttattttttatttttaaattcgtaattttttttttaagtatttttttaagaaatacgaaaatatatgattataaaaagaattgtataagaatgtttatagtagttttattttataatcgtaaatgggaaataatttaaaaggttattaaaaggacggatatataatcgatggattatattaaatgaaaaggagtaaaatattgatatatataatatgaacgaatgttagatagtatattgaaggatagaagttcgataaaaatgagtatataatgtatgattttttttttttttttgagacggagtttcgtttttgtcgtttaggttggagtgtagtggtacgattttggtttattgtaatttttgtttttcgggtttaagcgatttttttgttttattttttcgaatagttgggattataggtatttattacgtttagttaatttttgtattttttagtagagacggggatttattacgttggttacgttggtttggaatttttatttttaagtaattcgttcgtttcggttttttaaagtgtaggcgtgagttatagcgtttagtttgattttattttatatgaagttttttaataggtaaaatggttatggagattaaaataaaggtggggtcgggaatcgattgggaagagacgtgatgaaacgtttttgggacgatgaaaagggtttgtgatttggtaggtattacggagcggttaggggttaaaatttatttttttgtgtatttgttgtgtgtattggcgttgtgtgtaaatgttatttcgatttaggaaaaagatgacgtaagtacggtataaagtggtcggtacgcggtaggtgtatgggaagaaattgcggaatgaaataatcgcgagttaagagatggggtagcgggagaaatgaattcgagtttcgttttttattaggaagaatcggttcgggtcggagggttgtacggaggattatacggacgtttgcgggttcgtttttttcgttttacgacgtttagtttgcgtttggaattggaatggtttagtttaaagttagataataggtagattgttttttcgataaattattaaacgatttattattgtatttttttaaaatttgatttttagacgtatttattttttttttttttttttcgggaagatgagatatatttatttttgaaaatattttcgggtttgttttttgtatatttttttttttttttgttttacgttatggtagcgttcgtttaggttgtaggcgattcgcggggtggggtatattatttaaagaaggggagggattgaggtttgtattaaaataaatatttttgtttttgtaaaggttataattaagtaatttagaaaaagaaatgtaggcggagaatagtagtttttttttgttaagtaagaggaatcggtttaaaggatatttttttttttttttttttttttttatcgggtgaatagtgagttgtttcggtaaaaagaaatcggaaatgttgttgtaagaggtagaaatgtaaatgtggagttaaataataatagggttgtcgggttttttagattgcgacggtttttttcggtttggcgggtaaatttttggtttagtattttttatttttacgattgatagtttttaattggattttttttatttagcggagtcgggggttgtttggaaagatcgttttaggaaggataaaggttcggaagttgtgggattttagtagtttgggtttttcggattatttttaaatgattatttcggaatggagttttagtttttattaggatgttatgggttttaaaatatatagttatgagtttttaatgtttcgagatttaaaagttttagattttaatgttttgtgtattttttattttagggattttttacgtttagtatcgggtggatgtgtaaagaagtacgttttaggtcggtttaaggttttttaaagttttatttttttgtttaggcgtttaattttgagttcggatggttttaatatttttattatttatatttaggttttttaataatgtaatttttatgatgatttttttagttaagtttttattttatttatttttaaattcgttaagtttttattgttttatttttagttttagcgattttttcgagttgaaaatatacggagtcgagagttcgtgatttagagaggatttattaagtttagttaggagtttatttaatttagggaagcgtgttatcgtcgtggaaagtacgtttttagttcgaacgtaaagtgttttcggagtttagtagttatttgttttttggacggtggttttagatttttgagaagtttaaaatttttagcgttagttttgagtatatgggaggggaaaattttaattttattaatttttgcgaggtttttggtataaagttggatagtcgttatgataagtaagggtaagtaattcgtttgtcggaggaagtaaaggaaatggagttggggaggagggtgtagagttaggattttcgtcgatttggtgtcgtagatattaatattttggggtggaaaattttgtaagttagagttgtgagggtagaattggtggaaattattttggaggaattttgtattgtgttaaatatgaagggtggaaggaagaaagtttttgcgtttgtttttagttggattttttttttttattagttaaaatgttattttttaggaaggtttttcgtaatattatattttaacgtttttttttagatattttatattatattattttatttaattttttttataatttttattattttgataagatttatttgtttattgtttttagtatatggaaacgtaagttttatgaggatatagaatttttttattattttatttattgttgtatttttgagtgtttatattagtgttgggtagtaagtaagagttcgataataaatattttttgaatgagggagataggtttgaagtttggagaatgagatgtagaagaggtgtaagatttgttgcgttttttgtaggcggcgggggggcggtgtaggtgttttaagaattatcgcgggattcggtagggggagcgtaggcgtttttcgttaagatagaagcgtttagattataatttttagtagttacgaggagttttagggtttgatgggaacgggaaattttttaattttttacgtttcggtttcgcgggtttcgtgggtcgttcgcgaaatttgattcgggatgcggcggtttaatcggaaggtggatcgaaatttcgcgatagtaagaggttcgtagcgattcgcggtgttaaggaatatagtgtttttaaaagaattggcgttcgttgttcgttttttttttcgggagttttttgtttatttttagaagaggagggaagtataggtgggtttttttagttttgcgtcggatttttgagaatttcgaagttattttggttgaggttaattttcgttgtgttttttttgtagtatgaagattttggagatttaatcgttagtttcggattgttgttttttagattaggatttagttttagtttatttttttttttacgttttttcgatgaataaaaatgcggattttgaattgatgttatcgtttttcgaaaggggggattcgtttcggttgtttttagattttgtggttggtttagttgtgttttaggagttacgggagggggatttagtttttttttttatttttttggaaatagagtttggtttttttagtgagttgagttttcgaatcgaggagtaagaattttttgaaaatataagtttttttgtagaagaagtaaacgggagtttttttgaagaagaagcgaacgggttagagttggggtttggaaaagttatggaagatatttttggggaattcgttgtagaggacgagggagatacgtaagtggtgatggtagtggagtgtggagtttggggagatgaagtgtgaggtcgatttgttttttggttttgagatttatttttttaggtttttgttttttttgtttggcgatttaggtttattgttttttattttttttttagcgtttggaattatagttttttttagttgtttcgattttttagtggtttttggttagagtttagtatttaatttgagaattttttgaaaggttgtaagtggtaaggataataacggggtagggagttgattattttcgagatttttattgtaaaatagtttagttttttaggagagggatgttttagagttgggagaagcggtacgtagtttttttagattgagtttatattttatttagtagtttgtgttttttattttttttaaggatttaggggggtttatttattttagaggtaggtttagttttagttttatatttgaaaagtataggtttggttagttttttaatttttttttgtttttagggtttttgacggtttttgtattttgattaatagtgttgataatattttgcgaatttataatttgtttttagagttgtattatgagggggagtaggtggaatatgtagaaatggtaaggattggggttaattgtttttttattaatgttgtatatttaagtttttcgtggagatggaaaaagtgtagtttaagtgttttttgtttataaacgggattgttttttaagacgagtttttatatgtagcgttttttgtttcgaattttgaagttatttagagagaggttttttttttttttaattaggaatttgtgttttttgttaaaaagtagtgaattttttgtggtagtatatatatatttttattttttatttttttgagataaggttttgttttgttatttaggttggagtgttgtggtgtgatttcggtttattgtaatttttgtttttcgggtttaagcgatttttttgttttagttttataagtagttggtattataggcgtacgttattatattcgattaatttttatagttttagtagagacggggtttcgttatgttgggtaggttgatattaaatttttgattttagaggattcgtttattttggttttttaaagtgcggggattataggtgtgagttatcgtgtttggtttatagttatttattgattgattattgatatatgttagttattgtgttgggataaagtggtggataagatagatgaagggttggtttgttttttgtgtgggagatagataataaatatgtaaattagtaagtattaggattaagatgatgataaatgttttgaaggaaatatatagaatgaagagagattaattagaggaaagtatattgtataaaatggttaggaaggagttttttgaaaaggaggtatttgagttaagatttgaaggaggataagggattagttatgtgaaggtttttggaaagagttttttaggaattggtaatgatattataaatatttagaattgggaaatagttttgtgcgttaaaagattagaaaggttttgtatggtggtttacgtttgtaattttagttatttaggaggtcgaggtgtgtagattatttgaggttaggagttcgagattagtttggttaatatggtaaaattttatcgttattaaaaatattaaaattagacgtatgtggtggtacgcgtttgtaattttagttatttgtgtggttgaggtaggagaattttttaaatttaggaggtggaggttgtagttagataaaattgtattattgtattttagtttgggcgatagagtgagattttattttaaaaaataataaaatagattgggtttagtggtttatatttgtaattttagtattttgggaggttgaggtgggtagattatttgaggttaagagtttgagattagtttggttaatatggtaaaattttatttttataaaaatataaaaattagttgggtgtgatggtgggtgtttgtaattttagttatttgagaggttgaagtagaagaattatttgaatttaggagatggaggttgtagtgagttaagattatgttattgtattttagtttgggtgatagagtgagattttattttaaaataaataaataaataaataaataaataaataaatataaaataaaaaatttagaatgttggtatagttagattgaggtaagtgagggggatagaggggtgaggatagagaagtgtagtt

SEQ ID NO: 501 - DNA, 34769 bp, Artificial Sequence
  chemically treated genomic DNA (Homo sapiens)
aaaatatgagaaagtaagtatttgatattttttattttaaaagaggggggttttcggaatgttattgttttggtttttagtgattgtggtttttttttttgttagaggttttatgtttagattattagtgatatttttagtttttaaagattagtttagtttatataagggtaatgttgaaatatataagttaggttttaatattgttatattttattgtaaagtataaaagtatgttttaattcgttatttaaagttttaagatatttttaagtttttttttatttgtatgttaaaaattaaatttaaatgggaagtagtattgggagaaagtttttttgtgaattaataattaaaattttttgttagttttataaatatttttggataatttttttaaatttataaagggtaagaattgaggttttatagatgataacgaaaatggtaaggaatgtattaatttttttatgtagtgtcgaatttagagttaaaataatagaagattaaaagataggtttttatttttgtatatataaagatgtttcgtaaatgtttatttatttttattaatttatttttaatacgaaacgggaaatgtttaagtgttagtattatttttttaaagatagtttttttttgtttatatttgtttattatgtttttatttaagtaaataattttaagtaaaaataacgtttgagtatttatttgttgaatgtatattttattatagttttaagattaagaattgatgtttaaatattaattgtttcgttagttttatttattaaggttaaagtagtttgtgttttatgaatcgatattaaaaaagaaagttacgttagtttttcgtgggagaaaagagagataggcgggtgacggtagattggaataaggagttattatagtatttatttttttatattgtagttttgaaaattgtgattagttatagtgaattttttatgaaatggaatatttttattaatattttgaggaattatataaattttattgtaagatatgaaaattagaaatatggatttgttttttttagtttttagggtttttaagaagatgattttagtaatagattattattaagtgttttagggtattttgattagagtgtataagttggaaaaaaatatttaagttaagtaagtagatgtaatttttttttttataatttattgaaatttttataaatggtaaaaataaaaaataaattttttatttaattgaggaggggggtatattgaaaatatattaaggttgagatgttatttaaattaatgaggttttttgttttgtagttgatgttattttatgtgatttggaataaaatttttttgaagaggtaaaaaacgtaatttgagagttaaatttttaaaagttagatagagtataggaatgttaggagtggtaaaatttgaaaaagtattatgatatattagttagttagtataggtggtggataaggaaaacgaagtttattttttacgaggtatgtttttttttagtggttttttaatgttaattgttttttttttttgaggatatatatattaggtattcgggttattttttttttttgaggatatatattattaggtatttaggtatatatattatatgttttgaagtttaaagttatagttttgtgatttaagtatttttttgttatttatggaacgaagattttaaattttagttatgaggataattatttttttatttggggatagaatattagtatttaaattatttattcggtatgtggtagaggagaagagaattagaggagaagtagagatgataaagtagttatattatttattagtttataggtaatagaattattaatttgttttttgtgataaagtaataataaagagtcgatattttttatatttttatttgtgtgtagtcggtattgtcgatatttatttttttaagggtatttttttagattttttatttgtttacggtatttttttgggtttcgtatttgttcgggtatttgtcggggttttgtatttgttcggtttttatatttgtttggggtatttgtttgggtttcgtatttgtttggggtatttgtttgggtttcgtatttgtttggggtattttttcgggttttttatttgtttagggtatttttttgggtttcgtatttgtttggggtatttgtttagatattgtatttgtttcgggtatttgttcgggtttcgtatttgttcgggtatcgtatttgtaggatttttaagttgtttttatttacgcggtcgttttcggttttgttcgtcggggacgttggtatcgaggatgttttgttcgtggtttaggttttcgtcgtttattaggtatttgtcgttcggggagaatttgtagagtaagttggagagtttgaatatttcggagaagtttatggtcgtcgtttgtcgcgggcgttattttgcgttcgaaaattcgcgggatttttgggcgcgtagtaggttgtaatagtcgacgtcggttttcgaggtcggaagttagaaggcggaagtgaattgtagtttattagcgtcgtcggttttcgcgcggtattgtggggtttgtagtttttgtgtcgtagggttttaaaggaaacgtttacgtttttttcgattagggattttcgattcgagaattttattttaaaggtcgggaggtttttgagtatttttagttagggttgttgataaaaatgtagaaagtatagtaaaatttgaattttagatttataataaatttagttataagtatgtttttaaatattgtacgggatatgttaatacggaaaaattattcgttagtttgaaatttaaatttaattgagcgatttgtgtgtttgcgtgtgtgtatatatgtatatatatatatttatatttatatgtaaatgtatgtttatatgtaaatatatgtttatttataaatatatttttaataagtaatacggtgtttgtcgtatatatattatatcgtgtatgtaatgtataagtatttatttcgtttgtttggggttttgtttgtttttgttgagttcgatttttttatttgtcgtttggtttttgttttacgttttagtgttattgagattaaggagagaacgaatttgtcgttgattgggtagagcgagcgcgtggatcgcggttatcgttcgtttattattcgcgcgtatttgggttggtatcgggcgaagaatcgtgcgggtttgggatttgggggtttagagggagcgagtttttgcgcgggcgttcggttcgtaggtttcgtaggtttaggggcgtgtttcgtttttatttttatttcggatttcggtttttttttttagatagcggttttttttatttttggttttcgtaggtcgttagtagttcgcgttaggtttcgtcggcgtttttagggttttttagatcgcgtagattttgatattttcgtttggttttgggttttgggagttgagagtcggttagggttttgttcgtattttcgggcgtttagtttcgggtttgtttttcgcggacgttttaattttttcggtcgaatggatggtggtgcgcgcgcgttttatttcggcggtgtcggttttttttgttgttaaaattagatttaaatttttgtatgggattcgtttttgggtttttatttcgtgcgtttagtaaatagtgggtgagttatgaagatgtgcgagttagtcggatttttttcgttaggcgcggattcgttgcggttagagaatttagtttgcgttagttcggttcgttcgcgaagttacgggttttattgacgcgattttttaagacgtgggggttattatgggtagaggatatcggttcggagttagattacgggttttataagtattagattataagtagcgtcgttattgagagtcgttcggaattcgtttagtatgtcgggttttttagttagggtttggtgtacgtggtcgagggttttggaagtttcgatggtttaggaggagtaggcgggcggggcggcgggtgtcgttggtcggtagagagtttcggtttgatttagcgtaggtttggtgcgcgtagagaataattttaagcgtatcgacgttcgcgagttttttttaaatatcgaacgggatttagagttcgagtttataggcggcggtcgggggagggagtagggtgttggtcgtcgttcgggagtgttcgcgttttgggtgatttttggaaggacgtggggtttaaatttcggttggggttgggagagtagtttttagaggtttttcgcgggattttttgtcgggcgggatcgtggttttataggagaagtgggtggtaagttttgtttggcggaaagtagtcgtttttttttttttgggtttggggcggcgttttttatttttgtttttcgttttttatttttgtttttcgtcggttatattttttgttttttggattttaagcgtttcgcgcgtcgaggagtttagcgttagtggcggcggttaggagagattcgggtgttaggaaagatgggtcgtttgggggatagtagggagttcgggggaaacgtaggcgtcgggtatagagtcggtatcggcgtttttagttttgtcgaagatcgcggtcgggtttggttcgcgggaggggttttggcgtcggatttgtttcggttttgcgtgggcggtttcgtcgggttttgtaggagcgacgcgcgttaaaaggcggcgggaaggaggcggggtagagcgcgttcgggatttcgatttggacgcggttagttggagaggcggagcgtcgggaggagattttggtttcgtcgcgattcggtggttcgcgttgttttttcgcgcgtcgggttaaaaaggcgttaacgttcgcggtcgtttatttttcgcggcgtttttttttttcgcgtttatataattcgtttaggggtcgggtagttcgttttgttttttcgttcgcgtattcgttcggaggttcgcgcgttcgcgaaggggacgtagcgaaatcggggttcgcgttaggttagtcgggacggacgtcgatgttcggggttgcgacggttgtaggtaggaggtttagggtcggggggcggttcggtttcgcgggcgggggttggagcgtagcgttgggtaggtatttgggttcgtagtttcgaagttgggaggtgaggggagagcgatcggggacgagttgggataaggcgatataggggttttttcggagttggatcggtttttgggatttggcgttcgcgagaggttggagcggttagagtttagtttgcgaggagacgcgggttttgtttttagcgtcggtcgtttttggcgttaaagatagtttcgtaggggtttcgggagggttttttttttgttgttttttttttatttcgggtttcgagggtcgttgggagggtaatttcgggaagaggtcggggtgcggggcgcgggtgtaggtggaaatcgttagtaagttttttttcgttcgcgcgtttttttcgatttgtagggttgtgttaatttcgaggttttagtttttttgaggagttagggttaggtttttttttggatagggagaaggatttgggcgggggttttgatttatggagttggttattaagcggtttcgatggtttttcgagggatagttttttgtggttttgagtttgtttgtcgagggtttttggtttgttttcggagcggttttaggtagagaaagttcgtgaagaaatggttcgggtcggtttggagggagatattttacgtttttttagtttttgggtcgtttttttttgtagtttttgtttttttcggggtttggatttggggagcgatgattatttttgtttagtttgtattttggtttggacgttaggagataagtttatgtagtatgtatacgtttgttatataaataggggatagatagacgatttttaattagtaagggtgtagggaaaagtaatgtattttaaatttttgattagaggttatttgtttttaaagatgttgttatttgtttatttattgtttggatatttggaaatggtttaggtttattaatataatgttttggtttttgttgttttgttttttgttgttgttattgttgtttatttgtttagttttagttttgggggaggagtaaataaagcgcgtggtttttggtatttattgagcgttgagttatttttttttggatttattcggggaaagattaaaaagtattttattaagaataggatacggtgtttgaaatgttgttatatatgaatgtatgtattacgtatgtagtttttaaaataagataaaaagttggttgggtacggtagtttacgtttgttattttttatagtttttgggaggttaaggtgggtggattatttgaggttaggagttcgagattagtttggttattatggtgaaatttagtttttatttgaaatataaaaattagttgggtatggtggtaggtatttgtatttttagttattcgggaggttgaggtataagaattgtttgaatttgggatggagaggttgtagcgagttgatattatgttattgtattttagtttgggtaatagagtaagattttgttttaaaaaataagatgaaataagataaaagttggtgttagaggttgtagtgtggtagttgtttattgttaattagaggtagtttggggtgaacggaaggcggatttgagcggggtttgtttatgcgcggcggttattagagaatggttcgggatgtgagttttgttttgtagtttttttcgtgaaagttatagcgaatagtagttgtttttaaatttcgaaggttagtcgtatggagaagttggtttggtatagtggttaatggggtagtatggaagttagaatgttggggtttaaatttttttttttttatttattttagtaagttatttaattatttggagttttaggttatttatttgtagagtcgggtaatagtagtttttgttttagaggtttggagaatagttagtgaggtgtcgttcgaagggtttgggagagtgtttggtatttatttagtgtttttatatatgatggtttcgggttttaggtgttgttttagagttgggagagttaggagttttggggagagattcggttttttagtatttggtaggtatttttagggtaggagggatggtagtgaggtaggtatttgtttaaggcgtgggtggaagttgatggtatttgttagaagtatgtattggggtaaggatgtttggtttagtatttatttatagggtatgttttatttaggtttaagaatggattgataatattgagtacgtgtgaaaggtacggttaaagtggagagaagagaagaggttgagggtcgagagaggagtcgtatatttattttagaattcggacgaggttttgtttttgtttagcggcggtattaattttgagatttcgagtatattaaagtgatatcgcgtatacggtgaattttgtgtttgtaaaaagttagaaaaagtttttaaaatattttttaaggttaggcgtcgtggtttacgtttgtaattttagttttttgggaggtcgaggtgggtggattatttgagattaggagtttaagattagtttgggtaaaatggtgaaattttgtttttattaaaaatataaaaattagtcgggggtggtgtttggtgtttgtagttttagttatttaggaggttgaggtaggagaatcgtttgaatttgggaggtagaggttgtagtgagtcgagattattttattgtattttagttcgggtaatagagcgagattttgttttaaaaaaatacgtaaaaaatatttttggtgtgtgttttatgtaacgagttgttattttgcggtttgtttttgttttttagtgtggggagggttaaggtaattttttaagatatttgtatgttattttttcgtgattttgttttaaaagtaaaaaagaaaaaagttgagatgagttattaaatgataataacgtttattttttttttgaattttcgtgttatttgtatttgaatgtggtgaaagttttttaaatgtaatgttttattattagtaagtaggttgagtgattatttatttttattagtatttaatatttttatgttttgtttagatttttttaataaatatataaaatatatttgtagttggtaatatttattcgtgtataatgaaaatatataatggtttttttagaagtttgtttttttaagtgggttatataggatgtttcgaaaatttttttttgtgggtcgtgtagaaggtattttattttaaaaattttttttatttagtcgggcgtagtggtttacgtttgtaattttagtattttgggaggttgaggcgggtggattacgaggttaggagattaagattattttggttaatacggtgaaatttcgtttttattaaaaatataaaaaattagtcgggcgtggtgcgggtatttgtagttttagttatttaggaggttgaggtaggagaatggcgtgaattcggaaggcggagtttgtagtgagttgagattacgtattatattttagtttgggcgatagagcgagattacgttttaaaaaaaaaaaaaaaaaatttttttgtttattggtatttgagtgtaagatagtttatattaaagtgggtttagatagatatatgtatatgtttatagattttttgtttgttttttggtagtttattttgtgtttagtatttttttgtaggttaaatattcgtttatttaaagtgttttttttttttggataagttgtatattatagatttaaagaagaaaaagataatttagtttaatttttgttttttaatgttttttgtaataatttatatttagtttatggtggttgtgagttggtatttggttaaaaagtttatatttttttttttgtaatttttataatagttcgttgaagtagatattataattatgtttatttatagatgaggaaattgaggttttaattggttattttatttgtatagggttatatagttgtaaagtacgggagtggggattttagttatgattacgaagttgggattggggttgttaaattattttttgtttgggtttgtcgttggtttagatacggtttttagatatttaggatcgtggaatatttaggtcggaagggtttttttagaatatttaagttaggggtagagagtttagggtgttgtgagtttggatggggaaaaatggtattttgtattaattttaaagtaaattttagtattttttttagttttgaatgtaggtagtaaattatagttatagtagtatttgtgattttattagtgggaattattgatatttttatggtgttcggtaatagttgtagtattttaaaaagtggtttgtgtttgtcgtttcgttgtaattatggcggtgattagatttgtttttaggtttacgatttaatgtatgaataaagaagcgtatatatgattattttttagttttgttttttaaatattagggttattttgtaagtttttttaggttgttgttataaatgattataaattaagtggttggaaataatagagagtgttgttttacggttgtggaggtaggaatttgaagttaggtgtgggtagggtcgggttttttcggaggttttgagagggggttcgttttttgttttttttttaggatttgggggttgtcggttattttgtggtttttaggtatgtagatgtattatttagtttttgttattattttgttatggtttttttttttgtgtttttgtgtgtttttttttttttgttttttagatggatatttgtttttggatttcgggtttatttggaaaatttagaatgattttattttgagatttttatttaagtggtatttgtaaagattttgattttaaataatattttattttgaggttcgtttttagaggttgtatttaatttattagagtggttatgttttagtaattcgtgattttgtgtattttgttttatgtatttaaaatattttttcggataaggcgtttgagattttttaggttgttagaggggttatggcgtaaacggggaagaaatttggtttaagttacgtttttttttttaggacgaggattttggaattcggatattgaaggtcggggttgggtatagtcggggatgggtagttttttttttttttagtatttttcgtttggcgttttttttatagtttttgtattttggaaaatagattgttttatatattttagtagtttttttatttggggattgtttgggtcgtatagtttttagttagggatagaaattagaggtattgaataagaagttttatcgggagaggcgagattcgggttttagttttggatttggtcgtgggtgttatagaaggtcgggggatatcggtttgcgcggaagggtttggagaggtattttttagggagttggatagagaggagacgtcgttttagtggtggtttttagtgaggtttggagagattaggtggtaggaagggttttgttggggttagagtaagggtacggaaggtaggttttatggagtagggatcgtggaggggatatgggggatatattagggatggatagtggtcggaagatttcgtgggttttggagattaaatcgggttttttaaagagtaagttgtggagaggggaagggaaagttgttttttttttttttacggggtttttgttaataaacgattgataaaagatagatttataagagataatagttttaaggttgtgttttcgttcggaagtgttataaaaataggagatttagtagtaattagatgggagcggtgtagatgttcgttttttgtgatagaaaggaaagggggtttgggtttttggggagcggtagagataaatgaggagagggtgagggaggaaacgtttgggtataaaggttgtttcgtggtgtagttattagttttatggtgagaaaatgcgttttggcgcgcggttttttttttggtatatagattattattaatgaaaatgttttttatagatgttaattttttttagaaaagagagttttttattttattttagggagttgaagagttttttttttgttggttggtttttagttgtttttagtttaaagtaattaatatgttaatatggtatattttggggtgacgtattttggttttttatagttatattttggggtgacgtattttggttttttatagttatattttggggtgacgtattttagttttttatagttatatttaggggtggcgtattttggttttttatagttatattttggggtggcgtattttggttttttatagttatattttggggtggcgtattttggttttttatagttatattttggggtgacgtattttggttttttatagttatatttaggggtggcgtattttggttttttatagttatattttggggtgatgtgttttgagttttattgttttttagtttgaaatttttttaagaagttttacggtatagaaattgggtgggtgtgttgttttataatgttttgaagaggtatttttatggaaataaaagaaaaaaaaaaaaagttaattattggagttgattaaaaattagtttttgagtttgggggtcgtggcggggtaggtttgtagatgttgggtttcgagtattttttgcggtttggtttttggcgatgtttgggcggtttacgtagtaataggcgtgagggtttttcgtatttgggtttcgtggtaatttcgttgatgagtattttaagtcgtttagttttagtttgtaggatttttgggtaaagggtagttttgtttttcgtgattttaataagaacggtgggagaaaattgaaagtgttagtttgggagttgtagttagatattggaggaaattagaaatattaggaattcgtttagtttgtagatattaatagataataaaattttaaagacgttaaataggataagaatttaatatggggcgtataatatggttttttattgaaatatatgttttttttatattatttttttttttattaaaaataattttagtaagattattattattattattatttttgagatagagttttatttcgtcgtttaaggttagagtgtagtggtattatttcgatttattgtaaattttgtttttcgggtttaagtgatttttttgttttagttttttggagttataggtatgtattattattaatttttgtattattattatttttttttagtagagatagggttttgttatgttggttaggttggttttgaatttttgattttataggatttatttatttcggttttttaaagtgttaggattatagacgtgagttattgtgtttagtttagttagattaatttgtttgtaaagtaagtttagttttattaaaattggtttgattatttgtataagtgtagtaagaatagtaagtggttagttaggttttttttaggttagttttgttggaatttttaataaattttaggttaggtttttaaaagttttttgaggttaagaagttaagttaaggatttgatattagattttatttgtaatatttatagatttgggtggattttttttttttaaggtttttaacgtatttttgagaattattgttaaaaaattatagtttttttttaattcgtgaggttgtagaagttttttaatttaggtataagggtaattttgtttttttttaacgggttttattggttttataaagttaattttagttttttaaagttatttatatttgattttatgtatattatttttaaatatgatatttcggttaaatatttggtgagttaattaatatttttagttgttttttattataaggtagtagatttattttgaatttaagtaaataattttatggtcgtaaaaataaaaatgttaatagtttttaaattttggagagattaggtagggagaaaagttattattttaattttgtttataaaagtgtaatgtattagaatgttgtaagttataaatagtttttttatttatattttggaaatttttgttatttagtggtgtgattttaatgtattagaaatttgtattggttaaagttttttttatgaaattttttcgaagatataatattttagaattatagttgtttgtaaaagttttcgggaaagtattagagttaaatagttaattgtgtatgatagaaaggtttaaaatggttttggttaaagatgtgatgatattattataatgtaattgatgaggaagtttggttatttttgtggtgtatatttttatataataattagaattataattaatatagaatgtattagatttttaagaattttatataatttttggaatttttatatgaatatatatttatgtaaatataatttatttagagaaggttaattattattttatattttatagtgtttttatgtaaatttagttgattaaataagtttaatttatttaatatttttttattttatttaaaataattttttttttaatattggtaaaataatttatgtttttataaggagagaaaataaatttttttgagatattttaggggttaatttaggaaattttaaacgttaatttagggttaaaaagatttaatttagagtgtgtgattttggaaagttgttaaaatgttaaaaggttgaaagtatttgattaaatagaattttagattattatgaaataatatttaatttttatttaattaaagtaataatgaaatatttaaagagaaatgtagaaagttagatagtttaaaatatttttagatttggttaggtatggtgggttatgtttgtaattttagtattttgagaggttgatatgagcggattattagagtttaggagttcgagattagtttgggtaatatggtaaaatttcgtttttattaaaaatataaaaattagttaggtatggtggtatatgtttgtaattttagttattcgggaagttgagataggaggattttttgaatttagggagatttatgttatagtgagttgagatcgtattattgtattttagtttgagtaataaattgtatatatatatatatgtattttgtgtatatatatatatatataatatgtattatatatatatatatattatatataatatgtattatatatatatatatattatatataatatatgtattatatatatatacgttatatatataatatatgtattatatatatatatataatatatattttttattttattttttattttttattttttttaattagttgggtgtggtggtgtttatttgttttttagttattcgggaggttgaggtggtaggattttttgaagtttaggagttgaggttgcgatgaattatgatggtgttattgtattttagtttgggtgatagagtgagattttgttttaaaaaaaaaaagaattagtttatatttatgtttttttttgttgttttaaattgttatttttttggagtagtttttgaaggtggagattaggtatttgttggagtaggaattttttttttatcggtttttgttggggttttaggattttgtagttgtggtatttatagggagtaaggttagttacggaggtttttttatgttattaagttgtaggggaggaaaagtgatattagatagattaataggagaaaatttattttaatgatatgtttacgaatgggagttttatacggagatgaaattgggggaaggggttagatggcggaggcgtttgcgttatttttagttgtaggaagatataggattgtggggttgttgtaggttgaattagttatagtaggggagttgattggtgaatgaaggtggtttcgttacgcggatatgcgttttttaggcgattagagttatttggagtcgtttttttttcggtatagagatttttacgaatggaaatgttttttattttttttttagataggtagttgggtagagttatttttgtgtttgtagttattcgaaataatggatatatttaaggtatgtttggggtggtatattttgtttttttaagttatgttttggggtggggtggcgtgttttgagttttaatttaggtgttagggttatggaggggatattgtaagggggtttagaggggtttttatgggttttggagatggaattagttttttattaggttttaggatagatttggttggggagcgtagggaggggtttttagtgtgaggatagtatggggttgttttttttagtagtttcgagcgtttttagagaaaaacgaaatttttttttataagagaaatttgtttttggttttatgtgttgttttttgggtattggtatgagtaatttgagggcggcgttttttttattgtagtggtattatatagatgagggttttgttgattattatttggaaatagtgattattgttttatttatagatggggaggttgaagtttgggagattaatttatgttattaagattagttgtaggtcgggttatttatgtttgaggggagaaggggttttttttttttacgaggttggtggttgcggtatttataaagataggttaataagaggattttttgtttattacgagtttggtggttgtcgtattagtaatgaaagataagttaataagagggtcgtgtaggtttatttacgagaagttttatgtgatataggagttttgagaatggaatatttatcgaatcggggaattttgtatattttttttttgggtttgtggggtgtggatagtacggagcgtgatgaaaggatataggcggttgggcgtggtggtttacgtttgtaattttagtattttgggaggttgagtcgggcggattattaggttaggagatcgagattatattggtttatacggtgaaattttatttttattaaaaaatataaaaaattagttaggcgtggtggcgggcgtttgtagttttagttattcgggaggttgaggtaggagaatggcgtgaattaggaaggtggagtttgtagtgagttaagatcgtgtaataatgcgagattttattttaaaaaaaaaaaaaaagaaagaaagaaaggatatagatattttgaatcgggggttggggttaggtttgaaggttttgattttttttttttttgggtttagggtatatgagggtttgtgatttaatttagaggaaggttagagaatttttttatggtttgttttagggtgatagggagtaggagagagtatatttgttttttttggttttttagatgttatcgtgttaggttttggggtagtggtatgttttgagtttaattagtattttgggggtcgtggtcggtttttttttttttatgttataggttttttggagaggttattgttgtatttttattgtgagttcgatttgagttgtttatgggattatatttgagaatttttaagggtggtattggtagatttgaggtgtttaagtgaggttggtgtagtttttttgttttgttagtttgggtacgggtttttgggtatcgcgatttttatttttttattagtttagatgtagggtttgagtcggtagggtttttatttagtttagggtgtgtttttttattagaggcgttgtattggataggaaggatttatttgtttttttgtttagtattagttggtaggtttttcgtggtttagggtgtttgtgaggaggggtgggggttttaattgtttatttgttgttttgaggtgttaggtagggttgggggtggtatttggggaaggttgggttgagggggtaggttgttttttttgtaggagaggtgtagtattttattgggttttttggaaagggtagggaagtttttgttcgttcgtattgtattattttttgtgattttagtaatgattttttggttttattttttttattagttcgaatatatgagttagattcgtagtttttttttttatagttttttggttttcgggtttatttgggtggtgtttattcgttagattggggtttggtggttgtaggggacggggagtagttttgttttagtgtgggttatttttgattgtgagatggttggggggtaggggttgtagagtttgtgggaggtttcggttgggttttagagaggggtattttttttgtagaaaatttagttatttttattagatgcggttaggttataaagggaagatgtgttttttttttagaggtaggtgatttttgtgaattcgatgatcgagataaggtgtacgatttagtgggtaaggtaatttattattttttttttatggttttcgtaatttgtattatgtataatgtagggtgaagttagtttttaaattatagaggaaagattttgcggtttttgttagttaaataggagatgtaaattttaagttagttaatgagttgtgatcggttacgtttacgatttagtgtaggttttttttttttgttattatagtttttgtcggttgtattatgattattaattagtttttttataattataagagttttttgttatgtttttttttggagcgaggtatgttttaatttgtttttgggtttttaatttttgattagggacggttttttgattaattatttggtagtaatgagggaggatagatcgagttgtgaaagttttttttaagtttttagaaggaagttgtaaattaaaaaatgaggtattggtaaataggatgttaattggattaatatgaaaatgatgaattttgataaaaatagtaaaatatatcgttgtaagattgaggttagtataattttaagaatttattgtttaatgtttagttggttagtttggtttttgaaagtattagaataatagaaagagtttatttttgacgatgaagtatacggttagtaatttatgtaaaatagaattttaaaatcggaaggatttgatatgagtggggtgtatggaaattattcgtattttgaagttttataattttgatttttaggttttttggtttgtttttttttttttttttttttttttttagataatttttttttttgttatttaggttggagtgtagtggtatgattttggtttattgaaatttttattttttaggtttaagcgatttttttgttttagttttttgagtggttgggattataggtatgaattatcgtgttcggtttttttttttttttttttttttaagagatagaattattaggtaaggtggtttatatttgtaattttagtattttgggaggttaaggtaggtggattattaggttaggagtttgagattaatttggttaatatatagtgaaattttatttttattaaaaatataaaaattagttgggtatagtaattttagttatttgggaggttgaggtaggagaatcgtttttgaagttaggaggcggagtttgtggtgagttgagatcgtattattgtattttagtttgggtaataagagtaaaattttgttttaaaaaaaaaaaaaaaaaaaaaaaaaaagagagagagagagagagaattttattttgtagtttaggttggtgtgtagtggtgtagttatagttgattatagtttttaattgttgggtttaggttatttttttgtttgtgttttgagtagttgtgattatagatatatattattatatttagttaatttagttttgttgttttttgtttttagagatagggttttgttatgtattttatattaatgaatgtaaaattttaaaatggtgtttggtgtagagtaagttgtgtgttggtggggtgtaattatgggttatattgatagttttatttttgcggtatgtttttaggaatttattgatgtatatagagggatttgttggtaaatattgaagagttgtggggagaaaggaaggggtttgatagtgaaggtgggtgcgtgggcggggggtttttaatggtttttttgttggttttttttttattattttttgtttatttttttggttttggttgtaggttagggtgttttttgattttaaagaggtttgttttgtgtgttttattgagtaggaataaatcgttttagaagttttttagttcggaagtgagtaagtattggcggtggggatggtgttttgagtagacgcgatttagtgttatgcgggcgttttttttagggcggtttttagattgatttttaaatagagggtttagaaaagatgttttttaatgagggatatttatggttggtaaaaaaaagtggttttttaaaggtttttacgttttaatttttagaattcgtgtttatgttattttttatggtaaaggggatcgtgatttagttattttgagatggggaggttatttggtaggatttaggtgggtttagtgttattagggggttttataagaggggtgagagagggagttgatgatggaggtagaggttggagggatgtattttagagatggaggaaagtgttatatgttaaggaatatgtttgcggaagtaggagaggacggggaggtagggattgttttagggtttttagaattaagagaagataggggagtagggatttttttagggttttttaaagataggaagagggggaaatgtattttttcggggtttttagaagtagttagttttgttcgtagtttggttttagttttttggtatttatttcggattttgatttatagaattgtaagagagtaaatttattttattttgtgttgtttattgtgtggttattggttacggtagttatagaaaatagatagtgcgtatattcgtatggttttttttttagtttttgtttgataggtataaacgagggtagttgggcgcggtggtttacgtttgtaattttagtattttgggaggtcgaggcgggtggattatgaggttagaagattgaaattattttggtttatatggtgaaatttcgtttttattaaaaatataaaaaattagttaggcgtggtggtacgtgtttgtagttttagttatttaggaggttgaggtatgagaatcgtttgaatttgggaggtaaaggttgtagtgagttaagatggagttattgtattttagtttgggcgatagagagagattttgttttaaaaaaaaaaaaaaagaaagaaaaaaagtaaaaaagaaaaaaaggaaataaataagggtttgttttgtagtttatatttggattatttagtttaaaatagggtaggggagtttaggaatagttttgtaatttttgtgttacggtgtataggtgtgtaaaaattttttttgaattttttttttagtgtttttttagggtttatggttattgttattttgtgttagttgttttttagattagggaatagatttggttatggttatggttagggtttagttgttattgttttttttgttatttatttattttttgtttttaataaggatgttgagaggagttaggtattagtttttttgggtttaggttttttttttttttttatttttttatgaattaggggtgggggaggaggagtgtttgttaggaggttattgtagttaaggaatttaaattggtgtgtttgagaatgatttatggatatattttttaaagagttattcggttgcgatgaggggttatttttttttttggagttaatagttatgagtagttgttatatatattcgtgtagtatttagatatatattcgtgttgtttatttcgtgttgttgtaattgtgggggaggaaggtggtatagtggtagcgatatatatttttttttttaaaattggggcggggttttttaaaattttttgattagtattaaagatttagaatttgatattatggttgtatataatgttgaattatttgaatttgttgtacgtgtgtgtgtgtgtgtgtgtgtgtgtgtgtgtattgttggtaggattaaaacggttaattattagtaattttatggtttgatttaatattttaaaagagaggtttttatttgttggaagtatgtattggtgtattacggatgagacggttttataggtggaatttgttgtgaaatgttttaggaaataaaaagttagaggttagagtgatgagagttggggacgggtggatgggtttttgggtcgttttttgtagtgttgagtgtgtttggaagtgtttataatgaggagtagaaacgagtataaagttgggtggagatagttttgttttggttgttttgagttcggttttgttagtcgttttgaggagggttggggggagtagggatgtagggtggcgcgtgtatgttaggtggtaggcggtaggtgttggttttaggttcgtttttagttttagggttttaggttatgtttcgtttttagttgttttgtagttttaggtcggttacgttgtcgtttagtttcgtaattttaatgttattatttaggtgatagggacgttgttgttatcgttcgtttgcgggagttaggagttagtcgagggttatttttatttggttttatcgatttttcggggtttaggtttagttaaggtaggtttgggtttggttcgtttttttttcggtttgagtcggggggagtttttttgttatcgtgggtgtagtggtttcgggggtttattttggggtgtagagagtttttttacggttttttaggaggcggtttggaaatgtagtattgtttaggttagggtggggaggttttgtttatagtttttttgatgggataagttatagttttggggagttatttgttttaagtggtatattagggtttttcgtgtgattttaggatcgggggtagaagtggttttggtatcgttatttttattttttggatttattaggagttttttttattttttgttaaggaggcgtagagtgattgttttagtttggtacgttcgggggtttttcggttgggggtcgttatttttagttttatatagttgatttagaattttttagttttttttagtttttttatttttttgtggtttcggagtttttttcggtaatagtaagttatgtttcggttttttcggtatttacgtagttatttttaagtttgattatgacgtggacggtaggaaggggttgggtatgttttgttttttttgtttgggttttgtttttagggttggatttttaggttggggaatttttagggatttattaaattgggggataggggaggggtttgtggggatttgttgtgaggagggtagagtgtgtacgtggtagtgtttgcggatatatgtgtgcgtatatgtgaataggtgtgtttatgtgtatgtatgtgtaagtgtgttgttagaggtgagagggtgggtagggaaattgagtgattagtttttttttgaagttttgggggaatgttcgaggggttagggtttttggattttgtttttttggttttttgtaaagtttttagtttggttttttggatgggtatgtggttcggggggcgagattatgggttttttttggtttgttgtgtcgttttgggtgcgttttatattattttgaggatttttttgtttatttttaaggtagggatgatgatggggttaggggattatatgggtataggtaaggtagggatgatgatggggtcgggggattatatgggtataggtttttggaatgtgggtgtcgtttttttggggtttcgtagtttgaatttaagatttaagagttttatgtttaggtggggatgtataggagttttttagaagtggggaagaaggttaggcgtggtggtttatatttgtaattttagtattttgggaggttgaggcgggtggattaatagaggttaggagttcgagagtaatttggttaatatggtgaattttgtttttattaaaaatataaaaattagttgggcgtggtggcgtatatagttgtaattttagttattggggaggttgagttagaagaattatttgaatttggaaggcggaggttgtagtgagttgagatcgtattattgtattttagtttgggtgatagagcgagattttattttaaaaaaaataaaataaaataaaaaagataggaaaagaaaaagaaaaagtgaggagaaatgaggaggaagtcgagtaatttaattttaaatggtgtttttttagtagttattttgtttttgttttgatttgatttgttgggtttcgttcgtttaaattaaattatggattttgttatcgtttttttacggagtatttattgtgtgttaggcgggtgttggggttgtagcgtagagagtagttagggtttggtggtttggttcgtaaagagttagtatgtgaatgtttttttatgcgatgggtgttgggagggaggagttttggtaggtttggggaagattagcgttttttaaatgggggtgcgcgggttttgaggagtgaggttttttgatagtcgtttttcgtgggtgttatgttggttagagtggggtttggttgtatagttttttttagggttgggttggaagtataggtcggttggtatttgtttaggttttagggttttagggttttagttggaattgttttagggatggtaggggtgggtttgtttttggagaggcgtggggtgtgggagttgggagcgtgacgggaagtagtttttttagatttggagtagtatggagtttaggatttattgtgattttggtggttttgtattttgtttagttttagttgttgtttttgtttttttttgatttattggttgtttaggttgttttttggtcgagttttattatggttagtgtttttttattcgtttgtgagttttataagattatagttttgtttagggtttaggtagtttttgggttgatttagttatcgtcgggagtttttttcgtgacgggggtaaaggttggatcgttgtttgttttgtaggagtcggggtttttagaggacgggttgtttggcgggaaggtggagtttatcggagtttagtttaagttagttgtggtgtttttgagatgtgcggttttgggtaggttgttcgttttttcggggtttttgggaatatttggggatttttcgttgggtttttttgaggattgaatgagtttgaaaatatggaggatttggtatagggaatgttgggtagtaatattagaaaggtaattttgagagttagcggatagttattttgaggaatagtagtggttgtttttggaaggagtgaggggtgggtggattttcgtgatcgttgtacgggggaggttacggggttgagcggttattattgtgtaggggaggttatagggttgagcggttgattttagaataggaagggaatacgttaggagggaggattgtttattgagttagggcgggatttagagggacgtatgataagtttagggagttgatagttgtttggaagggtacgtttgtttagatcgtagggtagggagtggttagtagggagatatgtttattggtgtagcgggcgtgttttagattttttagagaaaagtttagagttaggggtgaggggtatgtgtagggtggggatattttagagtggagtatttttattaagggtgtttagaggagggtggttaggtggggatagtagtttgagaagggttatttttttttggttggaggagtggaagtgtttttttggggaaagaaagaagattttggaggatagtataggtatttttaatatgggcgttggtcgtataaaggttagtgatattcggtgtgattttttggggtagaaagggggtgtgagaggaggatcggagggggtagaggatagggatgtgtttgtgtagaacgaggttgtggtagttttagcgaaggcggttgcggttttattagttatttgttttgttgagggtagcgttgtatttattatttgtgaatataggtatcgatttagatatttattttggttataagtttcgttttgttttagttttggattttttattttttatttttggtagtcggttttttgggttttttttttgtgtttattgtgttggtttgaattttttttagtgatagatttgtttttattattttcgttagggtcgttttttttttaataggtgggtttttggtaggaaatattattaagtttagcgttttagttttttgatagggttttattttttttttgtcgttaatttcgtttttttaagggttatgtttttgtttattttttttattttttttttagaggaagtttagtttattaggtcgtttatgtttttgattttatttttaaatttttttgattcgtttatttttaggagtatcgtttattttaaggcgtaagtaagttggggttggggtgtagattttttttttattatttattttttttatatttagtttttgagggttttatagatatatatgatttgtttttagtgggttagggttatttgtttatcgcgttgtatgttttcgggtatggagttggtatcggttgtcgttgtaattgggtattattcgtttcgaggacgttttattttttgagagattgaggataggttggtgttttgtaaaagggtgcggagattattgtaaaagtggggtgagatacgcgtgttgattatgaaatggagaggtattcgaaggagttagggattcggtagttagtagattttattttttcgttttcgtgtgtgtagttttgtcgtttagtttggtgtttttgggattcgggttttattggttttttttttattgttattatttgatattaaataatcgtcggttaatggtaattcgatacggtttatggggtatttacggtgtgtttagatagaggagtgttttcgtttttgatatgcgtagagttattttattttatttagcgtttttaggaggtattataattatttttattttatagataaggaaatagaggtttagaatgggtaagatatttatttgaggttatatagttagagcgcggtagaggtgggttgcgtgggtagagtaggagagggaattggagtgtgtgttcggtagtgttgggttttagggtacgaagcggtggggtaggaattatgtgttttggtatgatttaaatatatatatgatagtaagaaggtttgggtaggtagtagaggataaggcgggttttttggatgtttggatgtggattgggttttaatgtatcggtgaagatagatggataggtaggggatttttagagaggggttttttaggtagggtgcggggtgtggttgtgcggtgggaatacggattggggaggggattgtagtcgggttcgtgttttttttgtttagttttaggttaggttagggtagagttaggttgttgggttcgatttttattttgattagttgtgtgtttatggagggttggttttttttttttgtgtatgttttttggttggtaataggtgtgtggttttattgggtcgtcgtggggtggttggaattttcgggaattagttatgttttggtgtttttatattttatttggttgagtgtgaattgatttaggaagttggttgggggtatttttatttacggggggtcgggtattttggtttggttatggttttaaagtttttggggtgaggtttagggatttttttagattgttttgggtatttgtttttttttttttttcgtttttcgtgggttacggtttaggagagagagggtagtttgtttaggtatttttagttgttcgtatattttatacggtgtacgttattttatcgtgggaggttgtgtttgttttttatttttatgttgggtttttttaaattaggggagtggggtagtaggcgtgttatttgtggcggtgaggggggtttttagtcgtattttttttattaggttttgcggataggttttcgtttttgtttttgatttgttgacgaagtcgttttggtaattttgtttgaaggatttggttttatcgtatttatagagggaggttatatggtttttagtttttgtcgggaggggtaggtaatgttggtagagggttttgtttttgagagggaggtttttttggtttttatttcgggggatttttgtttttggttttagtttgttaagcgagagcggtttttttttttgcggtggttggaggggagagtgaggttttttggtatagagggttttaggaggttgggttttgatgacgttttgtaggaatttcgttgggttgttgtttgggagagtcgttgttttatatagggttagtttgtttggttttattttggtgcgttgatcgttcgatttttttgtttaggcgggggtttttttgggttttgggttttgggatttgtttgagtttttgggaaaagggtataaggggattgagacggtttttttttataatggtttaggtgtttttttttataatggtttaggtgtttttttttataatggtttaggtgtttttttttataatggtttaggtgtttttttttataatggtttaggtgtttttttttataatggtttaggtgtttttttttataatggtttaggtgtttttttttataatggtttaggtgtttttttttataatggtttaggtgtttttttttataatggtttaggtgtttttttttataatggtttaggtgtttttttttataatggtttaggtgtttttttttataatggtttaggtgtttttttttataatggtttaggtgtttttttttataatggttttaggtttttttgttattttagattggaatcgttgatttgttgaaataataggtaaaattattggtggtttgggaattatcggaattagaagtgtattgagatgtttgttttaggggtggttcggggcgggtggagtttttgggggttttttttttttttttgaatggaggaggatattttgtattttttttgtgattttttttaagagttagtgttcgggatggttgggttagacggggtagaggggtttgtgttttttgtttaggttgagtgcggacggttcggttttagagttttatcgaggggtgggtaggtaatagtagttttgcggttagggtttttgtaggtgggagtgggtgtttttatggggagtgttttttttagagtgggtttagtcggggtggagtgttttggtttattaaaggtggttgtggagttttgtttgttttaggtttgggtagaggtggaaggggttggggaattgacgaggttttatttgtgggtttatggttaaggaaatgtttggttttttattttttgttaggtggtgaggggagaggatggggcgttagtcggagacggggtttttagaggaggttgggttttggtttggtttggagagatagggatgagatgggagggtaggaagggggtggtagataaaggttgaatatagagagtatatagttaggtatgtggggattggggataggggataaggagggtatttatggggataagagatagggagaggatagagggataggagacggggagggatagaggatgggggataaggaggggataggaggacggggatagggaggggatatagaaataggagttaggacggggatagaggatgggagaaggagaggttaaagggatagggaatagggaggggatttatggggatagggtagggatttatggggataagggatagggaggggatagagaaataggagatggggaggggatagagggatgtagatagggaggggatagaagatggggggttaggggataaagggaaaggggatagggaaggaatttatgggggatagggagatagggggatagggagaggatagaggaataggggatagggaggggatgtttggggatagggagggaatgtttgggatagggtagggggatagggggttgtggttttcgtgggaagttatggaagacgaggttagaggggttgggtagggtgagatgagagaggttgagagttttttatcggttgcggatttttttttatagggtagaggggagtattcgggtgcggttaggttattagaggatttgggtttggttggagttttagttttttagtttttagtagttttgggttagttattgggttttttggtttttatttgtttatttttgaattggggtagggttggcgtgtgagtttgaggttttgtaaagtgtttggttagttttagttcggagttatggtatagtatttttttttcgttacggtttcgatagttgggcgtgcgttttgttgtgggtagttgttttgagtaacgtagggtgttaagtagtatttttgttttgtatattagattttatagtattttttgatttcgtggaaaatgtttttatatgggaatattttttgggggtggaattgtttttggtgagaatttttaggttgagattttagaaggttttgagttaaatcgagaagttattagagagttttgtttttagttttagggagtttgggtaggttggttttttgggttatatagttttttttttagtttatttgtgtttcgtgggtttcggggaagttgtgggggtttaattgttggtgtgagttttttttttgttttgagttatacgtgtgtgggggttttttttgtggtgtagttggtatagcggtttttggagttgaggatttaagtaggttgaggtttgggtttgtcggagggttttcggtggttggtttttgttttgtttttattgttgtgggtattgtaggatttggaacgttggttatttttttagtttggtaaagggaggggatttgtttgaggttttatggaagttggggtagggtcgaggtgttttgttttttgggtgtgttagtagtttatagtttggttatagcgtaattaggaatatttagtataattgttttttgtaattttgtgttttgatttgatggtgttagggttgggggggtgtcggttagtagttttttaatgattatttttaaatgttgtggttatataaagttttttattgtaagatttgtggtaatatatattggacgtttttgttataattgagaatttatttattttattttttttttttttttttttttttttttttttttagagttgtggtttagttttgttgtttagattggagtgtagtggtgtaattatggtttattgtagtttcgagtttttgggtttaagtgatttttttattttagtattttgcgtggtttggattgtaggtatatgttattacgtttttatgtttagttaatatttttttaagtttttggagagttgaggtttttttgtgttgtttaggttggttttaagtttttgggtttaagtaattttttttttttggttttttaaagtgttgggattatagttatgaattattgtatttagtttattttttttagattaaatttttttagaaaaatttatatttttaataatgtatttgtattttatgatgttgataaaattttttaaagatgttttatgaaattggttttttttttttattgatatatatgatttttaaaattattggtaacgttttaaaagtaatttttgttttgttttagaatcgtgatttttttgtgaacgaatttttaaattaaaaggtaaatggttgggaaaattggatttaattgaaaggttattttattagaattgatttatttttttcgttattgggatttttgtttgaaaggcggttgtgggtagagggtatatattttttttgttttagcgtagcgtttttgtatttttaatagagttttttgttttttatgtttagtatttttagatgtttgcggagttagttattagtttaggtgtgtgaggtcggttgggggagtttttgtttggcgtttgtgtttgtgagtagtgtttttgtggggttttgggattaatgttattagcgttggcgtttttttaggaagttgggaattaggtatttcgtggttttcggtttaagttttttcgtgtgttttaagtttgggtaggttttcgggttttggttttggttaatgaggaattcgatttttatgggggaggtcggtggttgtagtagggtttcgagtagtggtaaggttggtttttatgatagtgttttttttagggggtttgttttaggttttttatgatttttttggaggtttgttaaaggggtagatttttgggttttgttttagttttattgtggggaggggtgttttggaagatgtatttgtttagggttttcggttggtttatacgtttgtatttggaggtttattgtttatattttaggtaaataggtttggggatgtttggggatttaatttttggcgtggaggaagttttttttttattttatatgtttttggtggtggtttgttttgtgagtttggagggtcggacgggtgggatcggggatttacgattacgttcgttggtttttgttttgtgtttaggtagggatgagaggttaagttggtgttttgtagtgtatagtgggtgtcggttaggggatgtggaagttgggttttcggtaggtagaggcgcgttgataagaagggtcgttgttttttatttagggtttagtgggaagagagggtgtcgttttagggggagtttataggatgtcgatttgaaaatatagttaacgtttatgttttaggtataagattataaattatgttttgtcgattagtttttgtgagttttgagttttgcgcggagggatgtttcgtgtatatttgtttacggaatttttggatttttagtaggggtgcggcgggatgtcgtcggtttttacgttgtttgtttttttgtttttttttttttttttttgtttttttgtttgtttttgtttgtttttgtttttttgtttttttttatttttttttgtttttttttttgtttttttgtttttgtttttttttatttttttgtttttttttgtttttgtttttttttgtttttgttttttttattttttgtttttttttgtttttgtttttttgttttgtttttttttgtttttgtttttttgtttttgtttttttttttttttgtttttgtatttttttgtttttttttgtttttgtttttttttgtttttgttttttttcgtttttttttgtttttgtttttttttgtttttgttttttttcgtttttttttgtttttgtttttttgttttgtttttttttgtttttgtttttttgtttttgtttttgtttttttttgtttttgtatttttttgtttttttttgtttttgtttttttttgtttttgttttttttcgtttttttgtttttttttttgtttttttttatttttttttttgtttttttttgtttttttttgtttttttttttgtttttgtttttttgtttttttttttgtttttttttttttttgtttttgtttttttttttttgtttttttttttttgtttttatttttgtttttatgtttttgtttttttttgtttttgtttttttttgtttttttgtttttgtttttttttgtttttgttttattttagttttgggaggggatagtttataggttgatagatgaggttatgtgttttgagtatgaggtttttaggttttatttacgttgtagtatgttagagtttcgtttttttttatggtcgcgtaatgttttattgtttgttggtattatattttttgtgttcggttttttgttgatgggcgtttgggttatgtgtatcgtttagttattaggaatggtgttgttgtgaagggagttgggattttgttatttatttgttgtggatggtaagtttatttttatttttggatttaggtggtttatttataaaatgaaggggatgcgatttagaggtttttggcggtaaaatttttttaggtttgtttttttggatttaagggaatttttttttttcgagtttagtttttttagtgtttttgttttttaggaaatatgtttgggattttttatttgtgtttatttagttttggtttatatatttgtattaagaggttattttatttatattgtttagtttaaagggatttatcgtggggtatgggtaagggcgggttttgttttttttcggggttttgtgttagttttagttggatttgcggttttgttttttgttatatttttttattttaaattaacggaatggtgcggtttttatgtatatttttagttttattggggttttagtttagtttaggatcggaggtttgtaagggtatatttatttggttacgtgatggtgaagtggggtggggtagggtaattaaattaatttttaattttaagagtttttggagtatttattattagtatttatagtcgtgtgattttatataagttatttaatttttttgagttttggggtttttgaaaagtggatggagcggttacgtttatttgggagaggtggtttgggttagtattttttaagttgtttgttttaggttattatggtttacggatcgttttttagtttggtttgtgttatttttttagggttcggtacgtggtagttataggtttttattagttttcgtttgtttggggaaggataaaaacgataggttttaggttatggtttgtattttcgttggtcgtgggtaggtttaggtttgtttgtttgagtattgtagggcggtggttaagtttgttttatagtattttatcgaggatttgggaggttggtttaggggagaggttattttagtcggggttgggggttgtgggtagggtgggttcgggtttttttgtttttttttttagttgtgttttgtttggatattgttatttttttatgggtgtttagggttattgggagttgggtttaggggtttttaggggagtaatggtggagataaagattagcggacgggcgttggggttagagttttttaatttttgggtgttttttttttaaggcgtgattatttaggtagtggtcggttgtaggatagggtagttttaagtttttagttttgttaggtttttttgtggttttggggtgtaggaaggagttttagtttagaaggcgagggggcgtttgtgttttgtagtagtgggtatagttaggttttagtcgggggtttggttgtagtttttagcgtagtttttatatacgttgtttttaagatggggtgatcgggatcggagttatttttaggtttcgggtattagggagattttaaatttggttgtattttttaggttaaatttagatataggggatcgtaatagattataggttttatatatttgtttcggtttaagtattttttaggttaaatttagatatagtggattataatagattataggttttatacgtttgtttcggtttaagtattttaaagagtttgtttttttgaaggtttttaaggtagttttaggagcgggtgttgttgttatttttttttttaaggcgacggttttgagaagtttttgtttgtttagggtatttttacggatgggtttgatttaggttcgttatttttaaggtagagttgtttatttggttttcggtttttagtcgcggggaatagggtggacgaaatgatagtggagagggtatagggagggtaaggcgggggtatttgttttagggatgttttaggtaggtttatttgtttgtcgtttttatcgaggttgttataggaggatagagtacgagtttttagggtgtttaggtgttatttttttttttttgtaga

SEQ ID NO: 502 - DNA, 34769 bp, Artificial Sequence
  chemically treated genomic DNA (Homo sapiens)
tttgtaggaaggaaggaatgatatttgagtattttgggaattcgtgttttgtttttttgtgatagtttcggtgggggcggtaggtaagtgggtttgtttggggtatttttggagtaggtgttttcgttttgttttttttgtgttttttttattgttatttcgtttattttgtttttcgcggttggaaatcgaaggttaggtgggtagttttgttttggaggtggcgggtttggattagatttattcgtgggggtgttttgggtaggtaggagttttttagagtcgtcgttttggaagagggggtgatagtaatattcgtttttggggttgttttgagggtttttaggagagtagattttttgagatgtttgggtcgggataagcgtgtgaggtttgtggtttgttatgatttattgtgtttaggtttggtttgggggatgtttgggtcggaataagtgtgtgaggtttgtggtttgttacgattttttgtgtttgggtttggtttgggggatgtagttaggtttggggtttttttgatgttcgggatttggaggtggtttcggtttcggttattttattttgggaatagcgtgtgtgagggttgcgttggaggttgtagttaagttttcggttagagtttagttgtgtttattgttgtaggatatagacgttttttcgttttttgagttggggtttttttttgtattttagggttatagggaagtttggtaaggttgggaatttgaagttgttttgttttgtagtcggttattgtttgggtggttacgttttgagaaggagatatttagggattggagagttttgattttagcgttcgttcgttggtttttgtttttattattgtttttttgagaatttttgggtttagtttttagtggttttggatatttatgaggaggtggtagtgtttaggtagagtatagttgggggaggggatagggaaattcgagtttattttgtttatagtttttagtttcggttgaggtgattttttttttgggttagttttttaggttttcggtgaggtgttatgggataggtttggttatcgttttgtaatgtttaggtaggtaggtttggatttgtttacggttagcgggggtgtaggttatggtttggaatttgtcgtttttgtttttttttaggtaggcgggagttgatagaagtttgtggttgttacgtgtcgggttttggagaagtggtataggttaggttgaggggcggttcgtgagttatgatggtttgggataagtagtttagagggtgttggtttaagttattttttttaggtgggcgtgatcgttttatttattttttaggagttttaaggtttagaggggttaagtgatttgtgtgaggttatacggttgtaagtgttggtgatgaatgttttaggggtttttagaattagaagttaatttggttgttttgttttattttattttattattacgtggttaggtgggtgtgtttttgtaggttttcgattttgggttgggttaaaattttagtggagttgagggtgtgtatggggatcgtattatttcgttaatttaaaatgggagagtgtgataggaagtagaatcgtaggtttagttgaggttggtatagggtttcgggggagagtagaattcgtttttgtttatattttacggtgggtttttttgggttgagtagtatgagtagggtagttttttggtgtaggtatgtgggttaaggttgggtgggtataagtgaggggttttaggtatgttttttgaagggtaggagtattggaggggttggattcggaggaaagaaatttttttagatttaagaggataagtttgggaaggttttgtcgttagaggtttttgggtcgtattttttttattttgtagatgggttatttgagtttagagatggaaatggatttgttatttatagtaggtggatgataaaattttagttttttttatagtagtattatttttggtagttgaacggtgtatatagtttagacgtttattagtagagggtcgggtataggagatgtggtgttagtaagtaatggaatattacgcggttatgaaaaggaacgaagttttgatatgttatagcgtgggtgagatttgaaaattttatgtttaggatatatgattttatttgttagtttgtgagttgtttttttttaaggttaaggtgggataaagatagagagagatagagatagagagatagagagaaataaggataaagagagatagagatatagagatagggatagagataggaagagagagatagagagagagagataaggataaagaaagagaaagataggaagagagatagagagatagggataaagagagagataaagagagatagaaagagatagggaaagagatagagagagataggaagagagatagagagacggagagagataaaggtagagagagatagggataaagagagatagagagatataaggataaagagagatagagatagagatagagagatagggataaagagagataaaatagagagataaggataaagagagacggagagagataaaggtagagagagatagggataaagagagacggagagagataaaggtagagagagatagggataaagagagatagagagatataaggataaagagagagagagatagagatagagagatagggataaagagagataaaatagagagataaggataaagagagatagagagtgagagagatagagatagggagagataaggataaagagagatagagagatggagagagatagagatagagagatagggagagagatagagagagatggagagagatagggagatagagatagatagagatagatagagaaatagagggaaagagagagggatagggagatagatagcgtgggagtcgacggtatttcgtcgtatttttattggaggtttaggggtttcgtgaataggtgtgtacggggtattttttcgcgtagggtttagggtttataggaattggtcggtaaaatatgatttgtgattttatgtttgggatatgggcgttggttgtatttttaagtcggtattttgtgaattttttttgaagcgatattttttttttttattgaattttgaatgaggaatagcgattttttttgttagcgcgtttttgtttgtcggagatttagtttttatattttttgatcggtatttattgtgtattgtaggatattagtttggttttttatttttgtttgggtataggatagaggttagcgagcgtggtcgtgggttttcgattttattcgttcggttttttaggtttataggataggttattattaggagtatgtggggtgggaaaggggttttttttacgttaggagttgggtttttaaatatttttaggtttgtttgtttgagatgtgggtagtgggtttttaggtgtaggcgtgtggattagtcggaagttttgggtagatgtattttttaggatatttttttttatagtggggttggggtagggtttaggaatttgtttttttaataagtttttaggggagttatgaagagtttgggataggttttttgaggaggatattgttatgagggttagttttgttattgttcggggttttgttgtagttatcggttttttttatgggaatcgggttttttattagttaaaattaggattcggaaatttgtttagatttaaagtatacggaggaatttgaatcggaagttacgagatgtttgatttttaattttttgggaaaacgttaacgttggtagtattggttttagggttttataggaatattgtttataggtataggcgttaggtaggggtttttttaatcggttttatatatttgagttgatgattggtttcgtaggtatttgggagtattgggtatgaggaataggaagttttgttgggggtgtagggacgttgcgttggggtagggggagtatgtgttttttgtttatagtcgttttttaggtaaggattttagtggcgagaaaaataagttaattttaataaaatggttttttaattaaatttaatttttttaattatttgttttttaatttgaaaattcgtttataaggggattacggttttgggataaaatagaaattgtttttgaaacgttgttaatagttttaaaaattatgtgtattaatggggaaaggagattaattttataagatatttttaggaagttttattaatattataaaatgtaaatatattattggaagtgtaggtttttttaagaagatttagtttaggagggatgggttgggtgtagtggtttataattgtaattttaatattttaggaggttaaggagggaggattatttgagtttaagggtttgagattagtttgggtaatatagggagattttagttttttaaaaatttaaaaaaatattagttgggtatgagggcgtgatggtatgtgtttgtagtttaaattacgtagggtgttgaggtgggagaattatttgagtttaggggttcgaggttgtagtgagttatgattgtattattgtattttagtttgggtaatagagttagattataattttaaaaaaaaaaaaaaaaaaaagggaaggaaggaaatgaaataaatgagtttttagttgtaataggggcgtttagtgtgtattattataggttttgtagtggaaggttttgtgtggttatagtatttgggggtggttattggggagttgttggtcggtatttttttagttttggtattattaagttagggtatagagttgtaaaggatagttgtgttgggtgtttttggttacgttgtagttaggttgtaggttgttggtatatttaggaagtagggtatttcgattttgttttaatttttatgaggttttagataagttttttttttttgttaggttggaaaggtgattagcgttttaagttttatagtgtttatagtagtgggagtaggataaagattagttatcgagggtttttcggtaaatttagattttagtttgtttggatttttaattttaggggtcgttgtattagttgtattatagggagagtttttatatacgtgtgatttagaataggaaaggaatttatattagtaattaggtttttatagttttttcgggatttacggagtataggtgggttggggaggggattgtgtggtttagaaaattagtttgtttaagttttttggagttgaaaataaggttttttgatgatttttcggtttgatttagggttttttgaggttttagtttaggggtttttattaggggtagttttatttttagaggatatttttatgtggggatattttttacggggttagagggtgttgtggaatttagtgtgtaagatagggatgttgtttagtattttacgttgtttagggtagttgtttatagtagaacgtacgtttagttgtcggggtcgtggcggagagggggtgttgtgttatggtttcgagttgaggttggttaggtattttgtagggttttaggtttatacgttaattttgttttagtttagagatgagtaagtggaggttaggaggtttagtggttggtttaaagttattgagggttgaggagttgggattttagttaagtttaggttttttgatggtttggtcgtattcgaatgtttttttttgttttgtggggaggagttcgtagtcggtgaggggtttttagttttttttattttattttgtttaatttttttggtttcgttttttatagttttttacgaaagttatagttttttgtttttttgttttgttttaagtattttttttttgtttttaagtattttttttttgttttttgtttttttgttttttttttgtttttttgtttttttgttttttataggttttttttttgttttttttttttttgttttttagttttttattttttattttttttttgtttgtatttttttgttttttttttattttttgtttttttgttttttttttgttttttgtttttatagatttttgttttatttttatgggttttttttttgttttttgtttttttgattttttttttttttattttttgttttcgttttagtttttgtttttgtgttttttttttgttttcgtttttttgttttttttttgttttttattttttgttttttttcgttttttgtttttttgttttttttttattttttgtttttatgggtgttttttttgttttttgtttttagtttttatatgtttggttatgtgttttttgtgtttagtttttgtttattattttttttttgtttttttattttatttttatttttttaggttaggttaggatttagttttttttaggaatttcgttttcggttgacgttttattttttttttttattatttgataggaggtgggagattagatatttttttggttatgggtttataggtaaggtttcgttagttttttaattttttttatttttgtttaggtttggggtagatagggttttataattatttttgataagttaggatattttatttcgattgagtttattttggaagaggtattttttatggggatatttatttttatttgtaggggttttggtcgtagggttgttgttatttatttatttttcggtggagttttgagatcgagtcgttcgtatttagtttgggtaggagatataggtttttttgtttcgtttggtttagttatttcggatattggtttttaagggggattataggaggggtgtagggtgtttttttttatttagggaggagggaaaagtttttaggaattttattcgtttcgggttatttttaaagtaaatattttaatgtatttttgatttcggtggtttttaaattattaatgattttatttgttattttagtagattaacgattttaatttgaagtggtaaagaaatttggggttattgtgggaggagatatttgggttattgtgggaggagatatttgggttattgtgggaggagatatttgggttattgtgggaggagatatttgggttattgtgggaggagatatttgggttattgtgggaggagatatttgggttattgtgggaggagatatttgggttattgtgggaggagatatttgggttattgtgggaggagatatttgggttattgtgggaggagatatttgggttattgtgggaggagatatttgggttattgtgggaggagatatttgggttattgtgggaggagatatttgggttattgtgggaggagatatttgggttattgtgggaggagatcgttttaatttttttgtgttttttttttagggatttaggtaggttttaggatttagaatttagaagagttttcgtttgggtagaggggtcgggcggttagcgtattagaatgaagttaggtaggttggttttgtgtgagatagcggtttttttaggtagtagtttagcggaatttttgtagggcgttattagagtttagttttttggggttttttgtgttaaggggttttatttttttttttagttatcgtaagaagaggggtcgttttcgtttggtaggttggggttaaggataggggtttttcggagtgagggttaggagggttttttttttaggggtaaggttttttgttagtattgtttgtttttttcgatagaggttaaggattatgtggtttttttttgtgggtacgatggggttaggttttttagatagggttgttaggacggtttcgttagtaggttaggggtagggacgaaggtttgttcgtagggtttggtgaggaggatgcggttgagagttttttttatcgttatagatggtacgtttgttgttttatttttttagtttggggaagtttagtatggggatgaaagataaatatagttttttacggtggggtagcgtgtatcgtgtgaaatatgcggatagttggaggtgtttgagtaagttgtttttttttttttgggtcgtggtttacgggaagcgggaggggaggggaggtagatgtttaggatagtttgggggaatttttgagttttattttagaagttttgaggttatgattaaattaaaatgttcgatttttcgtgggtgggggtgtttttaattagttttttgggttagtttatatttagttaagtgaaatgtagaaatattaaagtatggttaattttcggggattttagttattttacgacggtttagtgaggttatatatttgttattaattaggagatatgtatagagagggaagattagttttttatgggtatatagttggttagggtggaggtcgaatttagtagtttggttttattttggtttgatttggagttgagtaagggaggtacgggttcggttgtaattttttttttagttcgtgtttttatcgtatagttatatttcgtattttgtttgggaagtttttttttggaaattttttgtttgtttatttatttttatcggtatattgaggtttaatttatatttagatatttaagaggttcgttttgttttttgttgtttgtttaggtttttttgttgttatatatgtgtttgggttatattaagatatatgatttttgttttatcgtttcgtgttttgaagtttagtattgtcgggtatatattttagtttttttttttgttttgtttacgtagtttatttttgtcgcgttttagttgtgtgattttagatagatgttttgtttattttgagtttttgtttttttgtttgtaaaatggagataattgtagtgttttttagaagcgttaggtggaatgaagtaattttacgtatattaaaagcgaaagtatttttttatttgggtatatcgtggatgttttataaatcgtatcgagttgttattgatcgacggttatttagtattaggtggtggtagtggaggaagaattaatgaggttcgggttttaaaggtattaggttgagcgatagaattgtatatacgggggcggaaaggtggggtttgttggttgtcgggtttttggttttttcgagtgtttttttattttatggttagtacgcgtgttttattttatttttatagtggttttcgtatttttttgtagagtattagtttatttttagttttttagggaatgaggcgttttcgaaacgggtagtgtttagttgtagcggtagtcggtgttagttttatgttcgggggtatgtaacgcggtaaatagataattttggtttattggaggtaaattatgtatgtttgtgaggtttttagaggttgggtatgaggagggtgggtggtggaagagaagtttgtattttagttttagtttgtttgcgttttggagtgggcggtgtttttgggggtaagcgggttaggagggtttggaggtggggttagaagtatgagcggtttgatgggttgagttttttttaagaaaggggtggaaggggtgggtagggatatggtttttggggggacgaggttggcggtaggagggaagtggggttttgttagggaattggggcgttgagtttggtgatgttttttgttaggagtttatttgttagaggaagggcgattttggcgggggtggtaggagtagatttgttattaagggaggtttagattagtatagtgggtataggaagaagatttagaggatcgattgttaaggatagggggtgaggggtttagggttgggatagagcggagtttatggttagagtgggtgtttgagtcgatatttgtgtttataggtgatgagtatagcgttgtttttagtagggtaggtgattgatggggtcgtagtcgttttcgttggagttgttatagtttcgttttgtatagatatatttttgttttttgtttttttcgattttttttttatattttttttttattttaagggattatatcgggtgttattagtttttgtgcggttagcgtttatgttggaagtgtttgtgttgttttttagaattttttttttttttttagagaagtatttttatttttttaattaagagagaatgattttttttaagttgttgtttttatttggttatttttttttggatatttttggtggggatgttttattttgagatgtttttattttatatatattttttatttttggttttgggtttttttttaaggggtttgggatacgttcgttgtattagtggatatgtttttttgttgattattttttattttgcggtttgagtagacgtgtttttttagatagttgttaattttttgaatttgttatgcgtttttttgagtttcgttttgatttagtgagtaatttttttttttggcgtgttttttttttgttttggagttagtcgtttagttttgtgattttttttgtatagtggtggtcgtttagtttcgtgatttttttcgtgtagcgattacgggggtttatttattttttattttttttagaggtagttattgttgttttttagagtggttgttcgttggtttttagggttgtttttttgatattgttgtttagtattttttgtgttaaattttttatatttttaagtttatttaatttttagaggaatttagcgggaagtttttaggtgtttttagaggtttcgagagggcgagtagtttgtttagggtcgtatattttagaagtattatagttggtttaggttgggtttcggtgagttttattttttcgttaggtagttcgttttttggaggtttcggtttttgtagggtagataacgatttagtttttgttttcgttacgaagggggttttcgacgatggttgggttagtttaagagttgtttaggttttgggtagggttgtgattttgtgggatttataagcgaatggaggggtattggttatggtggagttcggttaaggggtagtttgggtagttagtaggttagggagaggtaggaatagtaattggagttggatagggtataggattattaaggttataatggattttaggttttatgttattttaggtttgagggggttgtttttcgttacgtttttagtttttatattttacgtttttttagggataggtttatttttgttatttttgaggtagttttagttggagttttggaattttgaaatttggataggtgttagtcgatttgtgtttttagtttagttttgagggaggttgtgtagttagattttattttgattagtatggtatttacgagggacggttgttaggaagttttattttttagggttcgcgtatttttatttaagagacgttggttttttttagatttgttagggttttttttttttagtatttatcgtatggagagatatttatatgttgattttttgcgggttagattattaagttttgattgttttttgcgttgtagttttagtattcgtttggtatatagtaggtgtttcgtgaagaagcgatgatagaatttatgatttggtttgagcgggcggggtttagtaggttaggttaggataggaatagagtgattgttggagaagtattatttggggttaaattgttcgattttttttttatttttttttattttttttttttttttttttattttttttattttattttattttttttgagatagagtttcgttttgttatttaggttggagtgtagtggtacgattttagtttattgtaattttcgttttttaggtttaaatgatttttttgatttagtttttttagtagttgggattatagttgtgtgcgttattacgtttagttaatttttgtatttttagtagagatagggtttattatgttggttaggttgttttcgaatttttgatttttgttgatttattcgttttagttttttagagtgttgggattatagatgtgagttattacgtttggtttttttttttatttttaaggggtttttgtatatttttatttggatatggggtttttgagttttgagtttagattgcgggattttagggagacgatatttatattttagaagtttgtgtttatgtggtttttcggttttattattatttttgttttatttgtgtttatgtggttttttggttttattattatttttgttttagggatgagtagagagatttttagagtggtgtaaaacgtatttagagcgatatagtaagttaggaagagtttatggtttcgtttttcgagttatatgtttatttaggaggttaggttggagattttgtaaagagttaagggaataggatttagaggttttggtttttcggatatttttttaaggttttagggaggagttggttatttagtttttttatttatttttttatttttagtaatatatttgtatatatatgtatatggatatatttatttatatatgcgtatatatgtgttcgtaggtattgttacgtatatattttgttttttttatagtaaatttttataagttttttttttgttttttagtttgatgggtttttgaggattttttagtttgggagtttagttttggaagtaggatttaggtagaaggaataggatatgtttagtttttttttgtcgtttacgttatggttaggtttgggagtagttgcgtgagtgtcggggaggtcggggtatggtttgttgttgtcgggagaggtttcggggttataaaagagtgagggggttggggagaattgggaggttttggattagttgtgtgaggttgaggatggcggtttttagtcgggaagttttcggacgtgttaggttggggtagttattttgcgtttttttggtaggaagtggaaagagtttttggtgggtttaaggggtggaggtggcggtattagagttatttttgttttcgattttagggttatacgaggagttttgatgtgttatttggggtagatggttttttagagttgtggtttgttttattaggagaattgtgggtaaggtttttttattttggtttgaatagtattgtatttttaagtcgttttttgggaggtcgtagaggggttttttgtattttagggtgggttttcggagttattgtatttacggtggtaaggagatttttttcgatttaggtcgagaggagggcgagttaagtttaagtttattttggttaagtttgggtttcggagggtcggtggggttaggtggaagtggttttcggttggtttttggttttcgtaggcgggcggtggtagtagcgtttttgttatttaggtgatgatattggagttgcgaaattaggcggtagcgtggtcggtttggagttgtagggtagttgggggcggagtatggtttggagttttggggttggagacgggtttggagttagtatttgtcgtttgttatttggtatgtacgcgttattttgtatttttgttttttttaattttttttaaggcgattgatagggtcgagtttagggtagttaggatagggttgtttttatttagttttgtattcgtttttattttttattgtggatatttttaagtatatttagtattatagggaacggtttaggaatttatttattcgtttttagtttttattattttgatttttggttttttgttttttggggtattttatagtaaattttatttatgagatcgttttattcgtaatatattagtatatgtttttagtaggtaagaattttttttttaaaatattaggttaaattatgaaattgttgataattaatcgttttggttttattaataatatatatatatatatatatatatatatatatacgtgtagtaagtttagataatttaatattatatgtagttataatattaaattttgaatttttaatgttggttagaggattttgaggagtttcgttttaattttggagagggaagtgtgtgtcgttgttattgtgttattttttttttttataattgtagtagtacggagtggatagtacggatgtgtgtttaggtgttgtacggatgtgtgtgatagttatttatggttgttggttttaggaggggagatggttttttatcgtagtcgggtgattttttggaaagtgtatttatgggttatttttaagtatattaatttgggttttttggttgtagtgattttttggtaggtatttttttttttttatttttagtttataggaaagtgaggggagaggaaagatttgaatttagggaggttggtgtttggttttttttaatatttttgttggagataaaaggtgggtgggtgataggaggagtaatagtagttggattttggttatagttatggttaagtttgttttttggtttgaagagtaattagtatagagtgatagtggttatgagttttggggggatattgaagggggagtttaaggagaatttttgtatatttgtgtatcgtaatataagggttgtaaagttatttttgaatttttttgttttattttaagttgggtggtttagatgtgaattatagggtaagtttttgtttatttttttttttttttttttattttttttttttttttttttttttttttgagatagaatttttttttgtcgtttaggttggagtgtagtggttttattttggtttattgtaatttttgttttttaggtttaagcgatttttatgttttagttttttgaatagttgggattataggtacgtgttattacgtttggttaattttttgtatttttagtagaaacggggttttattatgtgggttaggatagttttaattttttgattttatgatttattcgtttcggttttttaaagtgttgggattgtaagcgtgagttatcgcgtttagttgttttcgtttatgtttattaggtaagagttggagaggggattatgcggatgtgcgtattgtttgttttttgtggttgtcgtaattaatgattatataatgagtagtatagaatgagataaatttatttttttatagttttgtaggttagagttcgagatgggtattagggagttaaagttaaattgcgggtagggttggttgtttttggagatttcgggagaatatatttttttttttttttgtttttggggggttttgggagaatttttatttttttgtttttttttggttttggaggttttgggataatttttattttttcgtttttttttgttttcgtaggtatattttttggtatgtgatatttttttttatttttgaaatgtatttttttaatttttgtttttattattagtttttttttttattttttttgtggggttttttgatgatattggatttatttggattttgttagatggtttttttattttaaaatagttgaattacggttttttttgttatgggaaataatatagatacgggttttggggattgggacgtgaagatttttggggagttatttttttttgttaattataaatgttttttattgaaaaatattttttttgagttttttgtttgggggttagtttgaaagtcgttttgggagagacgttcgtatggtattgagtcgcgtttgtttagagtattatttttatcgttaatgtttatttattttcgagttgaagggtttttgggacggtttgtttttgtttagtgagatatataggataggtttttttgaggttaaagggtattttagtttgtagttaaggttagggaggtgggtaggaggtggtggggagggagttagtagagggattattaaaagtttttcgtttacgtatttatttttattgttagatttttttttttttttttatagttttttagtatttgttagtaggtttttttgtgtgtattagtgagtttttgagggtatgtcgtagaagtgaaattgttaatatgatttataattatattttattaatatatagtttattttgtattaggtattattttaagattttatatttattagtgtgggatatatagtaagattttgtttttaaaagtaagaaataataaaattaaattaattggatgtggtggtgtgtgtttatggttatagttatttaggatataggtaagaggatggtttgagtttagtagttggaggttgtggttagttgtgattgtattattgtatattagtttaggttgtagagtgagattttttttttttttttttttttttttttttttttttttttttttttgagatagagttttgtttttgttgtttaggttggagtataatggtgcgattttagtttattataaatttcgttttttggttttaaaagcgatttttttgttttagttttttaagtagttggaattattatatttagttaatttttgtatttttagtagagatggggttttattgtatgttggttaggttggttttaaatttttgatttggtgatttatttgttttggttttttaaagtgttgggattataggtgtgagttattttgtttggtgattttgttttttaaaaaaaaaaaaaaaaaaaaaggtcgggtacggtggtttatgtttgtaattttagttatttaggaggttgaggtaggagaatcgtttgaatttgggaggtggaggttttagtgagttaagattatgttattgtattttagtttgggtgatagagagagaaattgtttaaaaaaaaaaaaaaaagaaaagagagataaattaaaggatttaggggttagagttatgaaattttaaaatacgaatgatttttatgtattttatttatattaagttttttcggttttaaagttttgttttgtataaattattaatcgtatattttatcgttaagagtagattttttttgttattttaatatttttaaagattagattgattagttgaatattagataatgaatttttggagttatattggttttaattttataacggtgtattttgttatttttattagaatttattatttttatattaatttaattagtattttgtttattaatattttattttttaatttgtagtttttttttaaaagtttgggggggatttttataattcgatttgtttttttttattattgttaaataattagttaaggagtcgtttttgattaaaaattaagaatttagaagtaagttggagtatgtttcgttttagaagaaaatatgataggagatttttgtaattatgaggggattggttggtagttatgatgtagtcggtaaagattgtgatagtaggaaggagagatttgtattgaatcgtgagcgtggtcgattatagtttattaattagtttggagtttgtattttttgtttaattgataaagatcgtagagttttttttttgtaatttgggggttgattttattttgtattgtgtatggtgtaaattgcgaggattataaagagaggatggtgagttgttttgtttattgaatcgtgtattttatttcggttatcggatttataggaattatttgtttttaaagagggagtatattttttttttgtagtttgatcgtatttggtaagggtggttgggttttttgtagaagagatatttttttttgaggtttagtcgaggttttttatagattttataatttttgttttttaattattttatagttaggaatgatttatattgaagtaaggttgtttttcgttttttataattattaggttttagtttggcgggtgggtattatttaggtggattcggaggttaggaggttgtggaagagaaagttgcgggtttggtttatgtattcggattggtggagaaaatggagttaggaagttattgttaagattataggaaatggtgtagtacgggcgagtaggagtttttttgttttttttaaaggatttagtgaaatattgtattttttttgtaggaggggtagtttgtttttttagtttagttttttttaggtgttatttttaattttgtttgatattttagagtagtaggtgagtaattagagtttttatttttttttataggtattttgagttacggggggtttgttagttggtattgggtagggaaataggtgggttttttttatttaatgtagcgtttttggtagggggatatattttgggttgggtggaagttttgtcggtttaggttttgtatttgggttggtaggaaggtaggagtcgcgatgtttaggggttcgtgtttagattggtagggtagaggggttgtattagttttatttgggtattttaagtttgttagtgttatttttgggggtttttaggtgtggttttataggtagtttagatcgagtttatagtggggatatagtagtggtttttttagagagtttgtggtatggagggaggggggtcggttacgatttttagggtattgattgggtttaagatatattattattttaaaatttggtacggtggtatttgagaagttagggaaagtaggtatgtttttttttgttttttgttattttgaggtaggttataaaagagttttttggtttttttttgaattaggttatagatttttatgtgttttagatttagaagaaaggaagattagagtttttagatttggttttagttttcggtttaggatgtttgtattttttttttttttttttttttttttttttgagatggagtttcgtattgttgtacgattttggtttattgtaagttttatttttttggtttacgttatttttttgttttagtttttcgagtagttgggattataggcgttcgttattacgtttggttaattttttgtattttttagtagagatggggttttatcgtgtgagttagtatagtttcgattttttgatttagtgattcgttcgatttagttttttaaagtgttgggattataggcgtgagttattacgtttagtcgtttgtatttttttattacgtttcgtgttgtttatattttataaatttaggaggaaaatatgtagagtttttcggttcgatgggtgttttatttttaaggtttttgtgttatatggaatttttcgtaaataagtttgtacggtttttttgttaatttgttttttattattggtacggtagttattaggttcgtgataggtagagggtttttttgttaatttgtttttgtaggtgtcgtagttattagtttcgtgaagaagagaggttttttttttttttaggtatgggtggttcggtttgtagttgattttggtggtatgaattgattttttaggttttagtttttttatttgtgaatgggatagtgattattgtttttagataatgattagtaaagtttttatttgtatgatgttattgtagtgaggaaagcgtcgtttttagattatttatgttagtgtttaaagggtaatatatgggattagagataagttttttttataaaagagaatttcgtttttttttgagagcgttcggagttgttggaagaggtagttttatgttgtttttatattggggatttttttttgcgttttttagttaggtttgttttggggtttggtggggagttgattttatttttaaggtttatagaggtttttttaggtttttttgtaatgttttttttatagttttgatatttgggttggggtttaggatacgttattttattttaaaatatggtttgagggggtagaatgtgttattttaaatatgttttgggtatatttattatttcgagtaattgtagatataggagtggttttgtttagttgtttgtttgggagagaaatgaaagatatttttattcgtaaaggtttttatgtcgggaggagagcggttttaggtaattttgatcgtttgagagacgtatgttcgcgtgacgaaattatttttatttattagttaatttttttgttatagttggtttagtttgtagtagttttatagttttgtatttttttgtagttgaggatgacgtagacgttttcgttatttggtttttttttttagttttattttcgtgtgggatttttattcgtggatatattattaaaatgggtttttttttgttgatttgtttgatgttatttttttttttttgtagtttggtgatatgaaaggattttcgtggttggttttattttttgtggatgttatagttgtaggattttggggttttaatagaagtcggtgaaggaagagtttttgttttagtaggtgtttggtttttatttttaggggttgttttaggagagtggtaatttggggtagtaggaggaaatatgggtgtgaattagttttttttttttttgagatagggttttattttgttatttaggttagagtgtagtggtattattatagtttatcgtagttttaatttttgggttttaagggattttgttattttagtttttcgagtagttgggagataggtgggtattattatatttagttaattaaaaaaaataaaaaataaaaaataaaataaaaaatatatattgtgtgtatatatataatatatatattatatatatagcgtgtatatatataatatatatattatatatagtgtatgtatatatataatatatattatatatagtgtatgtatatatgtaatatatattatatatatatatatatatataaaatatatgtgtgtgtatatatagtttgttgtttaggttggagtatagtggtgcgattttagtttattgtggtatgaatttttttgggtttaagggatttttttattttagtttttcgagtagttgagattataggtatgtgttattatgtttggttaatttttgtatttttggtagagacggggttttgttatgttgtttaggttggtttcgaatttttgggttttagtgattcgtttatgttagttttttaaagtgttggaattataggtatgatttattatgtttggttagatttaagagtattttaaattatttaattttttgtatttttttttgaatattttattgttattttgattaaatgagaattaagtattattttataatgatttgggattttatttaattaagtgtttttaattttttgatattttgataattttttaaaattatatattttaaattaagtttttttgattttgaattaacgtttgggattttttagattggtttttggaatattttaaaaggatttattttttttttttataaaaatatagattattttgttaatgttaaagggaaaattgttttagataaaataaaaagatattaaataaattgggtttatttgattaattaaatttgtatggaagtattgtaaaatatgaagtgatgattaattttttttgggtgagttatatttgtatggatatatatttatataagagttttagaaattatatgaaatttttagaaatttgatatattttatattagttgtaattttagttattatgtgaaagtatatattataggaataattaaatttttttattagttatattgtaatgatgttattatatttttagttaaggttattttaagtttttttgttatatatagttaattgtttggttttgatgttttttcgaaagtttttgtaagtaattataattttaaaatgttgtgttttcgagaagattttatggggaagattttgattagtataggtttttgatatattaagattatattattggatggtaagaatttttagaatgtaaatgaagaaattatttataatttatagtattttggtatattatatttttataagtaaaattgaaatgatgatttttttttttatttgatttttttagaatttagaaattattagtatttttatttttacggttatagagttatttgtttaagtttaagatgaatttgttgttttgtaataggaaataattggaaatgttggttagtttattaagtgtttgatcggaatattatatttgagagtgatgtgtataaaattagatgtgagtagttttaaggaattaaggttgattttatggagttaatgaaattcgttggaggaaaataaaattgtttttgtatttggattaaagggtttttgtagttttacgggttgaggaaagattgtgattttttggtagtaatttttaagaatacgttgggaattttgagaaagaggaatttatttaaatttataggtattgtaggtgaagtttgatattaagtttttggtttgattttttagttttaagaggtttttgaaagtttaatttgagatttattaaaagttttagtaaagttgatttaaagaaagtttagttggttatttattatttttgttgtatttgtgtaaataattaggttaattttaatgaggttagatttattttataaataagttaatttgattaggttgggtatagtggtttacgtttgtaattttagtattttgggaggtcgaagtgggtggattttgtgaggttaggagtttaagattagtttggttaatatggtaaaattttgtttttattaaaaaaaagtaataataatataaaaattagtggtggtgtatgtttgtaattttaggaggttgaggtaggagaattatttgaattcgggaggtagagtttgtagtgagtcgagatgatgttattatattttagttttgagcgacggagtggaattttgttttaaaaataataataataataataattttattgagattatttttagtagaaagaggggtgatgtagaaagaatatatattttagtagaaagttatattgtgcgttttatattagatttttgttttgtttaacgtttttggggttttgttatttattgatgtttataaattggacgggtttttgatgtttttagttttttttagtatttggttgtaatttttaaattaatatttttaatttttttttatcgtttttattggaattacgaagaataaaattgttttttgtttagaaattttgtaaattgaggttggacgatttgaaatatttattagcgagattattacgaagtttaggtgcgagggatttttacgtttgttgttgcgtgggtcgtttagatatcgttagagattaaatcgtagaagatgttcggagtttaatatttataaatttgtttcgttacggtttttaggtttagaaattggtttttagttagttttaatgattagtttttttttttttttttttgtttttatagaaatgtttttttaaagtattatgggataatatatttatttagtttttgtatcgtggagttttttggggaagttttagattaggaaataatggggtttaggatatattattttaaagtatgattgtaggagattagaatacgttatttttaaatatgattataggagattagaatacgttattttaaaatatgattgtaggagattagaatacgttattttaaaatatgattgtaggagattagaatacgttattttaaaatatgattgtaggagattagaatacgttatttttaaatatgattgtaggagattagaatacgttattttaaaatatgattgtaggagattagaatacgttattttaaaatatgattgtaggagattagaatacgttattttaaaatatgttatgttgatatgttgattattttgagttaaaagtaattgagaattagttaatagaaaaaaagttttttagttttttaaaataaagtaaaaaatttttttttttaaagaaaattgatatttataaaggatatttttattagtaatggtttgtgtgttaggaagagagtcgcgcgttaagacgtatttttttattatgagattgatagttgtattacgaggtagtttttatgtttagacgtttttttttttattttttttttatttgtttttatcgttttttagaagtttaggtttttttttttttttgttatagaggacggatatttgtatcgtttttatttggttattgttgagttttttgtttttatggtattttcgggcgggggtatagttttaaaattgttgttttttgtgagtttgttttttgttaatcgtttattgataagaatttcgtagggaagagggaggtaattttttttttttttttttatagtttgttttttggggaattcgatttaatttttaaggtttacggaatttttcggttattgtttatttttaatgtgttttttatgttttttttacggtttttgttttatgagatttgtttttcgtgtttttgttttggttttagtagggttttttttgttatttggtttttttaggttttattggaggttattattgggacggcgttttttttttgtttaattttttgagaggtgtttttttagattttttcgcgtagatcgatgtttttcgattttttgtagtatttacggttaggtttagggttggggttcgggtttcgtttttttcggtggggttttttgtttaatatttttggtttttgtttttaattgggggttatgcggtttaagtagtttttaggtagaggagttgttggagtgtgtggaatagtttgttttttaggatgtaggggttgtggaggaggcgttaggcgggaggtgttgggggagaggggggttgtttattttcggttgtgtttaatttcgatttttagtgttcgggttttaagattttcgttttgaaaagaggggcgtggtttagattaggtttttttttcgtttgcgttatggtttttttggtagtttggggaattttagacgttttgttcgggagaatgttttaaatatatgaagtaaaatatataggattacgagttattgaaatatagttattttagtgggttggatgtagtttttgggaacgagttttagaatgggatgttatttggaattagggtttttgtagatgttatttaggtaagggttttaagataagattattttggattttttaggtgggttcgaaatttaaggataggtgtttatttaagggataaaaaaggagagatatatagggatatagaggagaaggttatggtaagatggtggtagagattgggtggtgtatttgtatgtttgggaattataggatggtcggtagtttttagattttaggagggagataggaggcgagtttttttttagagttttcgagggaattcgattttgtttatatttggttttagatttttgtttttataatcgtgagataatattttttattgtttttagttatttaatttgtggttatttgtaatagtagtttgagaaaatttataaagtgattttaatatttaaaaagtaaaattgggaggtgattatatgtgcgtttttttgtttatatattaagtcgtaagtttgagagtagatttaattatcgttataattgtaacggagcgataagtataaattattttttaagatgttgtagttattatcggatattatgaaaatattagtggtttttattggtgaggttataggtattgttatgattgtagtttgttgtttatatttaaaattagaggaaatgttgaaatttgttttgaggttaatataaggtgttatttttttttatttaggtttatagtattttggattttttatttttggtttagatgttttggaagggttttttcggtttgaatgttttacggttttaggtgtttgggggtcgtgtttgagttaacggtagatttaggtaaaggatggtttggtagttttagttttagtttcgtggttatagttggagtttttattttcgtattttgtagttgtgtgattttgtgtaagtagaatagttagttgaagttttagtttttttatttgtaaatgggtataattatagtatttattttaacgggttattgtggggattatagggaaaaaaatgtaaattttttagttaagtattagtttatagttattatgggttaaatgtgagttattataggaaatattaaaaaataagagttgggttggattattttttttttttttgggtttgtgatgtgtaatttgtttaggaaaagaaagtattttggatgagcgagtgtttagtttgtaaagaaatattgagtatagagtggattgttagggggtaggtagaaagtttgtaaatatgtgtatatgtttgtttgagtttattttggtataagttgttttatatttaaatgttaatgagtagagggattttttttttttttttttgagacgtagtttcgttttgtcgtttaggttggagtgtagtgcgtgattttagtttattgtaagtttcgtttttcgggtttacgttatttttttgttttagttttttgggtagttgggattataggtgttcgtattacgttcgattaattttttgtatttttagtagagacggggttttatcgtgttagttaggatggttttgattttttgatttcgtgatttattcgttttagttttttaaaatgttgggattataggcgtgagttattgcgttcggttgagtagagggaatttttagaataaaatattttttgtacgatttatagagaaggattttcgaggtattttgtgtaatttatttaagaaggtaaatttttaagaaagttattgtgtgtttttattatatacgagtggatgttgttagttataagtgtgttttgtgtatttgttaaaggaatttgggtagaatatggaagtattaaatattggtaggagtaagtgattatttagtttatttattggtgataaaatattatatttagaaaatttttattatatttagatataaataatacgggaatttaaaagaaaagtaggcgttattgttatttagtaatttattttagttttttttttttttgtttttaaagtaaaattacgaggaaataatatatagatattttaaaaggttgttttagttttttttatattggaaaataaaggtaagtcgtaaaatggtagttcgttatatgaaatatatattaaaagtattttttgcgtgtttttttgagatagagtttcgttttgttgttcgggttggagtgtagtggggtgatttcggtttattgtaatttttgttttttaagtttaagcgatttttttgttttagttttttgagtagttgagattataggtattagatattattttcggttaatttttgtatttttggtggggataagattttattattttgtttaggttggttttgaatttttgattttaagtgatttatttatttcggttttttaaagggttgagattataggcgtgggttacggcgtttggttttaaaggatgttttgaagattttttttgattttttgtaaatatagggtttatcgtgtacgcgatgttattttggtgtgttcggaattttagggttaatatcgtcgttgggtaagggtagggtttcgttcgggttttggagtgggtgtgcggtttttttttcggtttttagtttttttttttttttttattttagtcgtgttttttatacgtgtttagtgttattaatttatttttggatttgggtggggtatgttttataaataaatattaaattaggtatttttgttttagtgtatatttttgatagatgttattagtttttatttacgttttgggtagatgtttgttttattgttattttttttgttttggagatatttattagatattaaggagtcgggtttttttttagggtttttggtttttttagttttggaatagtatttgggattcgaagttattatgtgtgaggatattgagtgggtgttaggtatttttttaagtttttcggacggtattttattgattgttttttaagtttttgaggtaggaattattattattcgattttgtagatgggtaatttgaggttttaagtggttaagtgatttgttggagtaaatggggaagaggagatttgaattttagtattttgatttttatattattttattaattattgtgttagattagtttttttatgcgattggttttcgggatttggagatagttattgttcgttgtagtttttacgagaaggattgtaaggtagggtttatatttcgagttattttttggtggtcgtcgcgtatagataagtttcgtttaggttcgtttttcgtttattttaggttatttttgattgataataggtagttgttatattgtagtttttgatattaatttttattttattttattttattttttgagatagagttttgttttgttgtttaggttggagtgtagtggtatgatattagttcgttgtaatttttttattttaggtttaagtaatttttgtgttttagtttttcgagtagttgggagtataggtgtttgttattatgtttagttaatttttgtattttaagtagagattgggttttattatgatggttaggttggtttcgaatttttgattttaggtgatttatttattttggttttttaaaggttgtgagggatgataggcgtgagttatcgtgtttagttaattttttattttattttaaaaattatatacgtaatgtatatatttatatatggtaatattttaaatatcgtgttttgtttttaatgaaatgttttttaattttttttcgaataaatttaaagaggggtggtttagcgtttagtaagtgttagaggttacgcgttttgtttattttttttttagagttaaggttgaataaataaatagtaatgatagtaataaaaaataaaataataaaaattaaagtattgtgttaatgagtttgagttatttttaaatgtttagatagtgaataaatagatggtagtatttttggaagtaaatgatttttggttagaagtttggggtgtattgtttttttttgtatttttgttggttgaagatcgtttatttgttttttgtttatgtagtagacgtgtgtatattatatgggtttattttttagcgtttaggttaaaatataagttgagtaaaggtaattatcgttttttaagtttaagtttcgggaaaggtaggggttgtaggaggaggcggtttaggagttaagggggcgtgaggtgtttttttttaggtcggttcgggttatttttttacgggttttttttatttgggatcgtttcggagataggttaggagttttcgatagataaatttagagttatagggagttgtttttcgggaaattatcgaaatcgtttagtaattaattttatgggttaaggttttcgtttagatttttttttttgtttagaggggggtttggttttggttttttagggaagttgaggtttcgggattggtatagttttgtaggtcggagggagcgcgcgggcggggaggagtttgttggcgatttttatttgtattcgcgtttcgtatttcggttttttttcggggttatttttttaacggttttcggagttcggggtggagaggggatagtaggaggagggttttttcggaatttttgcggggttgtttttggcgttaaaggcggtcggcgttgagggtaggattcgcgttttttcgtaggttagattttggtcgttttagtttttcgcgagcgttaagttttaggggtcgatttaatttcgagggagtttttgtgtcgttttgttttagttcgttttcgatcgttttttttttattttttagtttcggagttgcgagtttaggtgtttgtttagcgttgcgttttagttttcgttcgcggagtcgaatcgtttttcggttttgggttttttatttgtagtcgtcgtagtttcgggtatcggcgttcgtttcggttggtttggcgcgggtttcggtttcgttgcgtttttttcgcgggcgcgcgagttttcgggcgggtgcgcgggcggggaggtagggcgggttgttcggtttttaggcgggttatatgggcgcggggaggggaggcgtcgcggggagtaggcggtcgcgggcgttagcgtttttttagttcggcgcgcgggaaggtagcgcgggttatcgagtcgcggcggggttaaggttttttttcggcgtttcgtttttttagttggtcgcgtttaagtcggggtttcgggcgcgttttgtttcgtttttttttcgtcgttttttggcgcgcgtcgtttttgtagagttcggcgaggtcgtttacgtagggtcgaagtaggttcggcgttagggtttttttcgcgggttagattcgatcgcgattttcggtagagttggggacgtcggtgtcgattttgtgttcgacgtttgcgtttttttcggattttttgttgttttttagacggtttattttttttgatattcgggttttttttggtcgtcgttattagcgttgggtttttcggcgcgcggggcgtttggaatttaaggggtaggggatgtggtcggcggggaataggggtgaggggcggggaataggggtgaggggcgtcgttttaggtttaggaggaggggaacggttgtttttcgttaagtagggtttgttatttattttttttgtggagttacggtttcgttcggtagaggatttcgcggagagtttttgggggttgtttttttaattttagtcggagtttgggttttacgtttttttaggggttatttaggacgcgaatattttcgggcggcggttagtattttgttttttttttcggtcgtcgtttgtgggttcgggttttggatttcgttcggtgtttggaaggagttcgcgggcgtcggtgcgtttggagttgttttttgcgcgtattagatttgcgttaggttaggtcgaagttttttatcggttagcgatattcgtcgtttcgttcgtttgttttttttaggttatcggggtttttagggttttcgattacgtatattaggttttggttaggggattcgatatgttgggcgagtttcgagcggtttttagtggcggcgttgtttatggtttgatgtttatggggttcgtgatttggtttcgaatcgatgttttttgtttatggtgatttttacgttttggaaagtcgcgttagtgaagttcgtggtttcgcgagcgagtcgggttggcgtagattgggttttttggtcgtagcgggttcgcgtttgacggggagggttcggttgattcgtatatttttatggtttatttattgtttgttgggcgtacggggtggggatttaaagacgaattttatgtagaggtttgggtttagttttggtaatagaaaaggtcggtatcgtcggagtaggacgcgcgcgtattattatttattcggtcggggaggttggggcgttcgcggggagtagattcgaggttgggcgttcggaggtacgagtaggattttggtcggtttttagtttttagaatttagggttaggcggggatgttagggtttgcgcgatttggggggttttagaggcgtcggcggggtttggcgcggattattagcggtttgcgggagttaggggtggagggggtcgttgtttagggaagaggatcggggttcggagtgggggtgagaacgaggtacgtttttgagtttgcgaaatttgcggatcgagcgttcgcgtaggagttcgttttttttgggtttttaggttttagattcgtacgatttttcgttcggtgttagtttagatgcgcgcgggtgatgaacgggcggtggtcgcgatttacgcgttcgttttgtttagttagcggtaaattcgttttttttttgattttagtggtattggagcgtgaggtaagggttaggcggtaggtagaggggtcggatttagtaaaagtaaataaaattttaagtaaacgaaataaatatttatatattatatatacgatataatatatgtgcgatagatatcgtattatttattaaagatatatttgtaggtaaatatatatttatatgtaaatatatatttatatataaatataaatatatatatatgtatgtgtatatatacgtagatatataggtcgtttaattaaatttgaattttagattagcgagtaattttttcgtattagtatgtttcgtgtaatatttgggaatatatttataattagatttgttgtgaatttgaaatttaaattttattgtgttttttatatttttattagtagttttagttggaggtgtttaaaggtttttcggtttttgaggtaaggttttcgggtcggaaatttttggtcggaagaaacgtgggcgttttttttaaagttttgcggtataagaattataagttttataatgtcgcgcggaagtcggcggcgttgataggttgtagtttattttcgttttttgattttcggtttcggaggtcggcgtcggttgttgtagtttgttgcgcgtttaggggtttcgcgggttttcgggcgtagggtggcgttcgcggtaggcggcggttatgaattttttcgaggtatttaagttttttagtttattttgtaagtttttttcggacggtaagtatttggtgagcggcggggatttgggttacgggtaggatattttcggtgttagcgttttcggcgggtagggtcgggggcggtcgcgtgggtggaggtagtttggggattttgtaggtgcggtgttcggataggtgcggggttcgggtaggtattcggggtaggtgtagtgtttgagtaagtgttttagataggtgcgggatttaggaagatattttagataggtggagggttcggggaggtgttttaagtaggtgcggggtttaggtaggtattttaagtaggtgcggggtttaggtaggtattttaagtagatatgggggtcggataggtgtaggatttcggtaggtgttcgggtaggtgcgggatttaggaagatatcgtagataggtggggggtttggggaggtgtttttggaaaggtgggtatcggtagtgtcgattgtatataggtgagggtataggagatgtcggttttttgttgttattttgttataaaaggtaaattgatgattttgttgtttgtaaattggtaagtggtgtggttattttgttatttttattttttttttaattttttttttttttattatatgtcgaataaatgatttaaatattagtattttatttttaggtaaggaagtagttgtttttatggttgggatttgaggttttcgttttatgggtggtagaagggtgtttaaattatagagttataattttaagttttaaaatatatagtgtatgtatttggatgtttagtagtgtatatttttagaagagagggataattcggatgtttagtatgtatgtttttagaagagggggataattggtattggaaagttattaagaagaaatatgtttcgtaaaaagtgggtttcgttttttttatttattatttgtattaattgattgatgtattatgatgtttttttaggttttgttatttttgatatttttgtgttttgtttagtttttgagagtttaatttttaaattacgttttttatttttttagggaggttttattttaaattatataaaatagtattagttataaaatagaaaattttattagtttaaatggtattttagttttggtatatttttaatgtgtttttttttttaattaaatgagaggtttgttttttgtttttattatttatgaaaattttagtgaattataaggagaaagattatatttgtttgtttaatttgggtgtttttttttagtttgtatattttggttaaaatattttgaaatatttggtaatgatttgttattggaattatttttttgaaagttttgaggattggggagagtaggtttatgtttttagtttttatattttgtagtagagtttatgtggttttttaaggtgttggtaaaaatattttattttataaggaatttattgtaattgattatagtttttaaagttatagtgtgagaaagtaagtgttgtggtagttttttgttttaatttgtcgttattcgtttgtttttttttttttttacggaaaattaacgtggtttttttttttgatatcggtttataaaatataaattattttgattttgataagtaaaattaacgaagtagttaatatttaaatattagtttttgattttgaaattgtagtaaaatatatatttagtaggtgagtatttaggcgttatttttatttgaaattgtttgtttggatagggatataatgaataaatatggataagaagaaattatttttaagaaaatagtattaatatttaaatatttttcgtttcgtgttaggaataggttaatggagataaatgagtatttgcgaagtatttttatgtgtgtagaagtgaaagtttgttttttgattttttgttgttttggttttgagttcggtattgtataagaagattgatgtattttttgttattttcgttgttatttgtgaagttttaatttttattttttataaatttgaggaaattgtttaaaagtgtttataaaattagtagaggattttggttattagtttatagaagagtttttttttaatgttattttttatttaagtttagtttttaatatatagataagaagggatttaaaaatgttttaaagttttaagtagcgagttaaaatatatttttatattttataatagagtatagtaatattaaaatttggtttgtatattttaatattatttttgtatgaattgaattgatttttaggggttggggatgttattggtgatttagatatgaaatttttggtaggagagaaggttatagttattgaaggttagggtagtagtatttcgaaggttttttttttttggagtggagaatgttaggtgtttgtttttttatatttt

SEQ ID NO: 503 - DNA, 6207 bp, Artificial Sequence
  chemically treated genomic DNA (Homo sapiens)
ttttttttggatagttgagatttttattgtattttatttttatagaatgattaattttttaaataaatttcgtttttatatgagttatagtgttatcggtagagatttgagttgatattttttattttttgttatgttttttaatcgtatgattaggtaagttttgggataggattgtgagtttttagttttgtttgaaaatatgattgttttatgttaatgttaatgttaatattaatgttaatgttaaagtaataaaatatattaagtaaggtatttttaaatagaattttattgatttaattaaatatttgtatagcgttttgtatttggagtggttatagagataaaggagagggtgaaggtggttgttttaataagttttaaagaagttaagaaagtttattattttaaatgataaggaaaagataaagaaaagataaaatagaaaaatttttatttttataatatgttaattttaataatagttttttttggttaaattattattagggggataatataaatttgtttgattaatttttttatttttaagatatagttgaggtaagtattttgaaagaaatatttttgtattttttattagtttgagttaggaggttttttttagtgtttatagacgtattgggtttattttttatgtatagcgtttattacgaggcgttgttttataaaaaatttgtttattttttttttttattagattatgaattttttggtaaggaaggagtatgtttttaatttatatttttagtatttagtatagtttttggtatatagatgtttaataattattttggaatgaatattaatattttattattataaataatgattgaaaaattaaaagggtagtaatttaaaatgttataaattagaaaaatgagttagagtgtagatgaaggttagatgatttaagttgggaagttattaattatttttagttcgttttagtagtagggagttaattttaatttggtgtttaatttttagggtatagaagattagaataacggaatagattttaaaagtgatttaattattgattttttattttatgtatttttggttattattattaaaagttatttaaaagttttatgtttagtgttttatatagtaattttaatggtaatgattataaattagtgagatttttaatataataaaaattatattgaggtgttcgtatatgtgttaggaaattatgagtagtatttttttttttaagaaaaaaatgtaagattttatttatgtttattagtttatattgtgtaaatttgggtatggataaaatataatttattggttagttaattgtttatttaataaatttttttgagttatgaaatttttataagattttttgttaggaattatgggaggtttaatataatatttatatttaaatttgatagattttattatttattttaagaaaggaagaggaaataaaaatttaagtggtaaattatttaagattaaatgtaaataagtattatattgtattttatagatgaagatcgtgtagatgttgagaaaaaggggagatttgtaatatttaaagttagaggagtagagatgggagttgatattttttattttttgttatgttttttaattttattattaggaaagttttggaatagggttgtgaatttttagttttgtttgaaaatatgattgttttattaatttgtaagtataatttatagggatttatggatagagattttagaagatttaagttttttgttgaggaaaagtaaggtagttttgtttttttgttttatttttttagtttataaataaattttttttttttggtgatttttttgggttttttaggatagtattgaagtattgtttagtgtttttaggtgtaagaaggttgtgatgtgttttagagagaaaatatatatgttaaataagtttaataaatttgattttggtatgagttttagtgttgttggttgttagtttaatgttaatgaaataataatatatatgatatatatgaaataaggtgtttttaaattaaaatatataaagaaataaaattgtgtattgattagttgataaaaatgttagaattacggtttgtggaaatttattttcgtatttttattaagagtgatggtttagtattgtaaaattatgttttttttttttgtttagggtatagtattagatttttataggtataattcgttttattgcgttttttttaattgtgttttatagatattgtatttttttttttttgatggagttttgttttgttgtttaagttaatttcggtttattgtaatttttgttttttaggtttaagcgatttttttgttttagtttttcgagtagttgggattgtaggcgcgtgttattacgtttggttaattttttgtatttttagtaaagatggggttttagtatgttagttaggaaagttttgattttttgatttcgtgattcgtttattttggttttttaaagtgttgggattataggagtgagttatcgcgtttttaataaattggaggtttgtggtatttttatgttgagtaaatttattggtgttatttttttaatgttatgtgtttatttgatgtttttgtgttatattttggtaatttttataatattttaagtttttttattatattatatttgttatggtgatttgggatgagtgatttttgatgttattattgtaattattttggggaattttgatttatgttcgtataagatagtgaattgaattaataaattttgtgtgtgttttgattgttttattagttagttatttttttatttttttttttttttttaggtttttttattttttgagatataataatattgtagttacgttcgttaataattttataatcgtttttaaatatttatatgaaaggaagagttatatgttttttattttaaatcgaaagttagatatgattaaatttagtgaggaaggtatgttgaaagttgagataggttaaaagttaggttttttgtacgagttatttaagttgtgaatgtaaaagaaaattttttgaaggagagtagaagtgttattttagtgaatatataaacgataaggaagtgaaatagtttttttgttgatatggggaaagtttgagtggtttggattaaattcgattaaagtagttataatatttttttaattatagtttaatttagggtaaagattttattttttttaattttataaagtttgagagaggtgaggaatttgtagaagaaaagttggaagttagtagagattggtttatgaggtttaaggaaagaagttatttttataatatgaatgtaaggtgaagtagtaagggttgatgttaaagttgtagtaagttttttagaagatttggttaagattattgatgaaggtagttatacgaaatatatatttttaatacggatgaaatagttttatatggaagaagatgttattaaggatttttatagttataaagaagttaatatttggttttaaagttttaaaggataaattgatttttttgttaggggtaaaagtagttggtgattttatattgaagttaaagtttatttattattttgaaaattttaaagtttttaagaattatgttaaatatattttatttgtgttttataaatggaataataaaatttgaatgatagtatatttgtttatagtatggtttattgaatatttttaagtttattattaagatttattgtttaaaaaatgtttttttttaaatattattgtttaatattggttaataatatattttgttatttaatagttgatggagatgtacgaagagattaatgttgtttttatgtttggtaaaataatatttattttgtagtttatggataaaggagtaattttgatttttaagttttattatttaagaaataaatagatagttgttattaatagtgatttttttgttggatgtgggtaaagtaaattgaaaattttttggaaaagatttattattttagatgttattaagaatatttataattcgtgggaggaagttaaaaagttaatattaataggagtttggaaaaagttgattttaatttttttgaatgattttgggagtttaggattttaaagtaggaagtaattgtagatatggtagaaatagtaagagaattagaattagaagtggagtttgaatatgtgagtaaattgtttaattttataagatttgaatggttgaggagttgttttttatggataagtaaagaaaatggttatttgaaatggaatttatttttggtgaagttgtttatagtattgttgaaatgatagtaaaagatttataattatataaatttagttgataaagtaatggtagggtttgagatgattgattttaattttgaaaaaagttataatgtagataaaatgttattaattagtattgtatgttatagaaaaattttttataaaaggaagagttaattgatgtagtaaattttattgttgttttattttaagaaattgatatagttattttagtttttagtaattattattaggattaattagtagttattaatatttaagtaatgttttttattattaaaaagatttttattaggtgaagatgatttttagtattttttagaaataaaatatttttttaagttaaggtaggtatattgttttttttagatatcgtgttattgtatatttaatagattatagtatagtgtaaacgtaatttttatatgtattaggaaattgaaaaattcgtgtgattcgttttgttgtaatattcgttttattgcgggggtttggaatttaatttgtaatatttttgcggtatgtttttatagcgtcgggagtgggtgtttttcgtcggttgtatagagcgtcggtaggtggcgtttagcggcgagtttgttttagtttggtttgggttaggtggattggaaggggcggaggtaattagaagcggttagtggcggttgtttgcgtttttaatttttttcgcgtagcgttcgcgatacgcgtgttaggagtgggagcgagcggcggggttagttgcgttttgagtttgggcgtagttgttatttgttttgggaagtattagggtgttttcgtcgtttttagttcgaagttagttattatggaggcgtaggtataaggtgagtggtcgtcgatcgtttcgagagttaggttttggggcgcgtataaaggttttttttttgtattatttaatttcgttttcggatagaatagattggtgtcgtgttgtatatttagaattttatttttattcgcgtttttggtataatgtttgttgtttaaatttaggatttgttgtgggtttggggattaataaagtgataggggattcgtaagtggagaggtttttttttaggaaatgcgttcgtggaatgttttattttttttcgtagttagtcgtttttggtttttttaatttcgcggttgttcgaaggatttgttgtgtcgggttcggaaagcgtgtttcgtttttttttttttgagggagtggggagggaatgtgatttttttcgtttagggtcgtggattcgcggtttgtggtttttaagttagggagtgaggggatcgttcgtcgagggggtggtttcgtagttcggttgcgcgagacgtttttcgttcggggattcgtttttcgaggttaggtgaattttatcggttttttgatttttagtagatttatacgtgagtttcggtttttcgcgatcggggagcgatttttgtttttcgtggcgcgcggggttttcggtcgtttagttttttgttttcggggttgtttgttggaggagtttgcggtggttttaggaagggcggttttatattttggggttatatttggaatagggttggggaatttcgatggaatcgtttaagaatgggggtaaacggatcgtggaaaggggtagaggtgggcggatgtggagcgagagataagtgggaaggaaacggatttagtgatttattttggggagtaacgtttagaagggatggtttgcggagtttagtttttaaggtaattaaagttattatttttttatatagtaggaaattttgtgttggtttttagtataaataaaattttattaaaaagaaaaaaaaaaaggtttatgatttgatgcgttcgtttttta

SEQ ID NO: 504 - DNA, 6207 bp, Artificial Sequence
  chemically treated genomic DNA (Homo sapiens)
tagagggcgagcgtattaggttatgaatttttttttttttttttttaatgagattttatttatattaagagttaatatagagttttttattgtgtaaaagaatggtggttttgattgttttaaaggttgaatttcgtaagttattttttttgggcgttgttttttaaggtagattattgagttcgttttttttttatttgtttttcgttttatattcgtttatttttgtttttttttacggttcgtttatttttatttttgaacgattttatcggaattttttaattttgttttaagtgtgattttaagatatgaggtcgttttttttgaagttatcgtaggtttttttagtaggtagtttcgggagtagggagttgggcggtcgggggtttcgcgcgttacgggaggtagaggtcgtttttcgatcgcgggaaatcgggatttacgtgtggatttgttggaggttagggggtcggtaaagtttatttggtttcggaaggcgggttttcgagcgggaagcgtttcgcgtagtcgggttgcggagttattttttcggcgggcgatttttttattttttaatttgggagttataagtcgcgagtttacggttttgggcgaaaagagttatattttttttttatttttttaagggaaagggagcgaaatacgtttttcggattcggtataataggtttttcgggtagtcgcgaggttgggaaggttaggggcgattggttgcggaagagggtagagtattttacgggcgtattttttgaggaggggtttttttatttacggattttttgttattttattgatttttagatttatagtaaattttgagtttgggtagtaggtattatattaaaggcgcgggtgggagtggagttttggatgtgtaatacggtattaatttgttttgttcgagagcgaagttaggtggtgtaggaaaagagtttttatgcgcgttttaggatttgattttcggggcgatcggcgattatttattttgtgtttgcgtttttatggtggttgatttcgagttgagggcggcggggatattttggtgttttttagagtagatggtagttgcgtttaggtttagaacgtagttggtttcgtcgttcgtttttatttttggtacgcgtgtcgcgagcgttgcgcggagggggttggggacgtaggtagtcgttattagtcgtttttggttattttcgttttttttagtttatttggtttaaattaagttggaataagttcgtcgttgggcgttatttgtcggcgttttgtatagtcggcggaaggtatttattttcggcgttataagggtatatcgtagagatattgtaggttaggttttagattttcgtaataaagcgagtattgtaataaaacgagttatacgaattttttagttttttaatgtatataaaagttacgtttgtattatgttgtagtttgttaagtatgtaatagtacgatgtttagaaagagtaatgtatttattttaatttaaaaagatattttatttttaaaaaatgttaaagattatttttatttaatgggaatttttttggtggtggaaggtattgtttggatgttgatggttgttgattgattttggtagtgattgttgaaggttggaatagttgtgttaattttttaaaatgggataataatgaagtttgttgtattaattgatttttttttttatgaaagatttttttgtagtatgtaatgttggttgatagtattttatttatattataattttttttaaaattggagttaattattttaaattttgttattgttttattaattaagtttatataattataaattttttgttgttattttaataatgttgtgaataattttattaggagtagattttattttaagtaattattttttttgtttgtttataagaagtaattttttaattatttaagttttatgagattgagtaatttatttatatatttaggttttatttttaattttagtttttttgttatttttattatatttgtagttattttttgttttgaagttttgaatttttaaagttatttaggagggttggaattaattttttttaaatttttgttaatgttgattttttgatttttttttacgaattataaatgtttttaatggtatttagaatggtgaattttttttagaaggtttttaatttattttgtttatatttaatagaagaattattattaatggtagttatttatttattttttaaataataaggtttgaaagttaaaattatttttttatttatgggttataagatgaatgttgttttgttaggtatgaaaataatattaattttttcgtatatttttattaattgttgagtgataaagtatattattaattaatattaagtaataatatttagaaagaaatattttttgagtagtaagttttaatagtgggtttaaaaatatttaataaattatgttgtaaatagatgtattgttatttaagttttgttgttttatttatagagtataggtggaatatatttagtataatttttaagggttttaaaatttttagaatggtaaatgagttttggttttaatgtaaagttattagttatttttgtttttaataagagagttagtttgttttttgaagttttgaaattaggtattgatttttttgtagttgtaaaagtttttggtagtatttttttttatataaggttgttttattcgtattgaaaatgtgtgtttcgtgtagttatttttattaatgattttagttagattttttggagaatttgttgtagttttgatattagtttttgttgttttattttatatttatgttatggagatgatttttttttttaagttttatgagttagtttttgttagtttttaattttttttttatagattttttattttttttaggttttatagaattgaagagagtgaggtttttgttttggattaggttgtggttaagagaatgttgtgattgttttgatcgggtttgatttagattatttaaattttttttatattagtaagaaaattgttttatttttttatcgtttgtgtatttattggagtagtatttttatttttttttaagaagtttttttttgtatttatagtttgaataattcgtataagagatttagtttttggtttattttagtttttaatatgttttttttattaaatttaattatgtttagttttcgatttaaggtgagagatatgtgatttttttttttatgtgaatatttggaggcgattgtagggttattaacgagcgtaattataatattgttgtgttttagagaatggagaggtttaagaagagggagagagatggggaaatggttggttggtggagtagttagaatatatataagatttattgatttaatttattgttttatacgggtatggattagggttttttaaaataattataatggtaatattaaagattatttattttagattattataatagatataatataatgaaaaagtttgaaatattgtgagaattattaaaatgtgatatagagatattaagtgagtatatggtattggaaaaatggtattaatagatttgtttaatatggggatgttataaatttttaatttgttaaaaacgcgatagtttatttttgtaattttagtattttgagaggttaaggtgggcggattacgaggttaggagattaagatttttttgattaatatgttgaaattttatttttattaaaaatataaaaaattggttaggcgtggtggtacgcgtttgtagttttagttattcgggaggttgaggtaggagaatcgtttgaatttgggaggtagaggttgtagtgagtcgagattagtttgggtaatagagtaagattttattaaaaaaaaaaaaatgtagtgtttgtgaagtatagttaagagaagcgtaataagacgggttgtgtttgtaaaggtttgatattatgttttggatagaggaagagaatatggttttataatattgagttattatttttagtggagatacgaaggtaggtttttataagtcgtggttttaatatttttgttaattgattaatatataattttgtttttttatatattttagtttaaagatattttattttatgtatattatgtatattgttgttttattaatattgagttaatagttaatagtattaaaatttatattagaattaagtttattaagtttatttaatatatatattttttttttaaggtatattataatttttttgtatttaggaatattagatagtattttaatgttattttggggggtttagaaaaattattaaaaaaaaaaggtttgtttatagattggagagatgaaataagaaggtagagttgttttgtttttttttagtaggaaatttgaattttttggggtttttatttatgagtttttgtaggttgtatttgtaggttgatgagatagttatgtttttagataggattagaaatttatagttttgttttaaggtttttttggtaatgagattagaaagtatgataaggagtaagaaatattagtttttatttttatttttttggttttggatgttatagatttttttttttttttaatatttatacgatttttatttgtaaaatataatgtggtatttatttatatttggttttgaatagtttgttatttgggtttttgtttttttttttttttttaaaatagatggtaaagtttgttaggtttgagtgtggatattatgttaaattttttataatttttgataaaaagttttataaaaattttatagtttaaaaagatttattgaataaataattaattaattagtaggttatattttatttatgtttaagtttgtatagtatagattaataaatataaatggagttttatattttttttttgaaagaaggaatattatttatggttttttggtatatgtacgagtattttagtgtggtttttgttatgttgaagattttattgatttgtaattattgttattaaaattattatgtagaatattaagtataaggtttttaaatgatttttggtaatagtgattagggatgtatgaagtgaagaattagtgattaaattatttttaaagtttatttcgttgttttggttttttatattttggaaattaaatattaggttagggttgattttttgttgttaaaacgagttaaaaatagttaatgattttttagtttgagttatttaatttttatttatattttgatttatttttttgatttataatattttaagttgttatttttttaattttttaattattatttataataataaaatattggtatttattttaaaatagttattgaatatttatatgttagggattgtgttagatgttaagggtatgggttaaggatatgttttttttttattagggagtttatgatttggtgagaaggagggataaataggttttttataaagtagcgtttcgtggtaagcgttgtgtataaagggtaagtttagtgcgtttgtgagtattgagggaagttttttaatttaggttggtgagaagtatagaaatgttttttttaaaatgtttgttttagttgtgttttaagagtaaaggaattagttaggtaagtttgtgttatttttttaataatggtttagttaaagaagattattattgaagttaatatattataaaaatgaagatttttttattttgttttttttttgttttttttttgttatttaagatggtgaatttttttaatttttttaaagtttattaaaatagttatttttatttttttttttgtttttatggttattttagatgtaaaacgttgtgtaagtgtttgattgaattaatgaaattttgtttaaaaatattttatttaatgtattttgttgttttaatattaatattggtgttgatattaatattaatatgagatagttatgtttttagataagattagaaatttatagttttgttttaaggtttgtttggttatgcgattagaaagtatgataaggagtaagaaatattaatttaggtttttatcgatagtattataatttatataagaacgaagtttgtttagaaagttgattattttataggggtgaaatgtagtagaaattttaattgtttaaaggaaa

SEQ ID NO: 505 - DNA, 12968 bp, Artificial Sequence
  chemically treated genomic DNA (Homo sapiens)
ttttttgtgatttagtgttgttattaatatataaggttgatagagtaattttaaatttataatattatatgtagatatttaaaggaaagaaaaagagttttatgtgattttgtttaatgggtttatttatagttgtaaatgtatattgtaagtgatttatatttgggaattattatgtaataattatttttaataataattgatataatttattagaatttgtgagaggtttcgatgtaaataatttatttgtttagtagagagaagggaaggagagtaagtaggggaaaatgtttttaaaatgttttattattggaagtaaatgattataaatgtttttgcgttaagttagggtttggttttaatttttttttgaattttaatgtttttatattttttaaatatattttaaatttttattaaataaattatattttaattatatacggagtttaaaagaggtgattttatgatagatatttagtattagttagtgaaggagaatattggttgaaggtatttaaaattacgtgtataaggaatagtttattttttatttggtgatttattattttaagttatttttgtgttaaagttataaaaatttttagtgttaaaaagtgtaagaagaaatgagttagtaaaaaaaaaaaagtcgggggaaagttaatttttaaatttgtattatttttatttttttattttttgttattttagaatgtatatttggaatgaatttttttagagacgtttacggtatgttaaattttaagttatatttttaaataaagtatatatttttatagatgtgtatatgattttatatttatgtatttttatgtataatttgtgatataatttaattaaataattaaggttgtttttgttgattttaatatatttaaaagtagttttttatattgtaaatgttatattatataaaatattttaatgaaagtttaaatgatatttttagttttatagcgtttattataggtgtattttgatgttattaaatgtttttatataattttttaaaaataaaatagagtttggttttttttatagtttagtttattatttgtgttatagtagtggtaatgtaagatttttatgagagtaaaatgtttattaagtatttttaaattttaaaaagattaattttaaaatgtttttagtttgttatttgtgaggtatataatgggtttatgaagtgaaagtgaaattattatatattaattatagtattttatagaaatatttagatggaggaaggatgtaatggaagaattaagggtttttttttttttttttatagtaattagatttgaaaagtgaagtaattttaaagttattttagaagaaaaaaatgtttaattaaattttaatgtttaaaattggatagtgtgtatggtaggtgatttgtatatatatgttattttttattaaaattgttttttatttttgtgatattaatataaattgtagttatttggttttaaattatagtaagatatattttattttttaaaatgtaaatggttatttaaaatagaaataatttttttagacgtattgtatttttataaatgtgattttggaaatatattgttcgtaaagggtaattttaagagaattgttgagattttaattttatttttatgtatattttggggaggtttttgaaagagtaaaaaggtaaaagatttagttattttttgagattatttatagttttttatttaaagttgtagaagaaaaacgttaatgtattgttattgttttttaatgaaattattttttttttaattaattaagtagtattttttaaatttattgtagaaatgtatattttatttttgttgtgagtcgtttttaattttttttttttttttttttcgtaataaaatttggaaaaatttgttacgtagtattcgtttaacgtatcgtttcgttgtattttttttttttttaattttgtattatgataaaagtaaattttagtattattttagggaaatattgggaatgaatttggtaatgttttttttttttttttttttaggtaaaggaaggggaattttgtattgtcgttaaaatgagcgtttttggtggaaaggaattttttatttcgtatacgttgtggttgtttttgaaagtgtaggtttcgtaaaatgttcggtcgattaaggggtttttttttttcggagtttttgtttttttttatttattttagatttttagtaaggaagggtagaggttggtttgttttttttttttaagagggtatcgcgttgcgtagttaatagtttgcgtcgtttcggggaaatttaaatgtttcgcgattttatcgagttaaggagtaaaagttgtgattgttattagttttttgtcgggttttaaattcggggtttatcggttgaaatttttagttgagtagtttttacgacgttgtttttgacggttaaattcggtgtatgtaaggttgggattaattttttttattcgataaaggaatttgatttttttttgggagatcgtagttcgagttcgattcgtagttttcgtcgcggggtttagggttttaggtaagcggttcgagatttagaggagtttttttggattttttcgaggggtaaattattcgagtttgttattttttttggagttaaaagtttatttttggagtcgttatattttcgtgttttttttcgtatttcgggggtttcgggggatgtacgtgggggtggttttaggagttttgggtgggatttcggggaaatgtattggagattaggcgaaaaggttttttttgtttagaatttgtttttagagcgggtcgcgttcgaattcgtaggtaaaggcgttgcggtttttgcgggcgggcgggcgcgcgcgatgtattttttttagggatagagttagaaagtggacgtttgggcggggggagggggggatttataattggaattaggtttaaaaaaattattttaaaagaaaaatgtagtaagtttttttttcgagattttaggtttattaaaataaaattgaattcgggtgttggtagtgtttagggggagcggaggcggagagggttgaggtcgcgggtcgttcgttttagtttttcggaagttcgggtttttgaagtatagatagttaagagcggttcgagttaagttttaggaataggggtttcgggaagagatttcgatcgggtcgtatagcggggaggtttggttcgagagtttttatttggtcggttgcgattttatattggaatttcggaaacgcgttttggtcgttttagtttaagtgggttttggggcggttttttgttttttattttcgaacgttagtttttttcgggcgattcgaaggttacgaggcgggtcgtatagtttcgcgtcgtcgggggcgtttcgggagtttcggggattgcgcgcggcgtttagggagggcggttgttgttttttggcgttcgttagagttcgcggcgcgtttcgatagtttcgcgtagttcgggttcgttcgggaaaggtttttacgttagttaatttcggtttttttttgcgttcgggttcgcggtaacgttcggggatagtttttgcgcggtagcggttatagtattttagttttgggggagggaggagcgggcgttaggggtttcgtgaggtcggcgagggattttcgcgtcggggagtttaattgaggggtttcgcggggattataaagtagttcgcggtggaacggggtcgggattcggggattgggttgtagtttcggggtggatgagaggtttcgggaggtgtagggttcggtagggagggcgtggagggatttatggtgacgggagtagttttcgttgggagggagtttcgtcgggcggggtcggagttggtagcgtacgtcggatcgggggcggggtttttcgagtttcgcgaaaatgttcgtagtatcgcggggatcggcgtagggggaagcggtcgttcgtacgcgaagtcggggtgggtttcgtatttggggtcgttcgagcgtacgggggcggggagaggagcgggggtcgttttcggggagtcggaggggagacgcggggttcgggtaggttgttcggttgttgcgggtgtcggcgttataaggttcgggagtaagtcgcgtggttgtttttaattttttttttagtcgcgcgtttttggggttttttttgattaggaaatttttcgttggtcgttgacgtacgtagtaagtgagacgcgcggagggatcgagtcgcggttcgggcgtagcggtaaaaaatatttattatagaaatcgatttaagggaagacgttgagagtaaacggtacgcgcggacgtcgttcggttttatgtaaggaattagcgtcgtttcgtcgtagttgttagtcggacggtgtaggagcgcggagtggttttttcgggtttcgcggttaaatcgtattttcgttttggaagcggaggtttggttttgggcggtcgcgtaggatttggggtcgttcgcgggttgtagttcggttcgggagtttcgtggcggttattgcgtttgtttgtagcggttcgcggggtcgggttttttcgggtgcggcgcgtcggtcgggtttttttcgggtcggcggggtttgttttttttttttaggttttcggatcgtggttattcgcggagtcgtataagtttgcgtgtggttgcggaaaggggttcgtacgcgggcggggtttcgggttagtatgtaggtttggatgcggggcgcgggggtggttttcgatttttcgttcgggttgcgtatagtagcgcgcggcgcggcggcgggggcgcgcgggttaattttaggagtcggcggcggcgagtcgcgttttggttgatatcggaaaggtttgtgattggtcgtcggtcgtttttatgtaaacgagttgagggaatggaattttttcggtcgggtttatagtaaaagtacgtttatttttaggtatttttatttatagagttagcgggcgcgggcgggacgggcgtttcgcggtcggatttagttagggtattacgttgttcggttttgcgtcgttaggtattttttttcggggtttttagggacgttagaaggaagttaatttttgttgtttttttttggtttgcgttggatttttttttttttgttgtttttttttgtttttttttttttttttttttgaattaattggttttttggttggatgtttttaattttttttttggttgcgaatttttttttaattgttttttttttataatagggggagaaagtgttttgtggttcgaggcgagtcgtgaagttgcgtgtgcgtggtagtgtgcgtggtaggatgtgcgtgcgtgtgtaattcgagtcgttcgatttgtttcgatttgcgtcgcggagtttttttttaaggttcgttttatttgttgcggttacgcggcgttcgtgggtgttcgtgtttcggagtagttaatcggcgggtgttgggcgacggtggaggagtatcgtttcgttgttgttcgagttagggttgagttatttagttgatgtagatagtggttgtttttcgaagagtgcgtgtttgtatgtgtgtgattttgcggttgtttaatttttaataaattagaggattagttataaatttaattaatatttttaaattcgagtttatagatgtgggagagttgtagaattttgagtgttatcgattgggtttttttatgattgttgttttaagattagttgaagatttttgaaacgttgaattttttgtattgagcgttttgatagaatttattgagagaatagagaatatgataagtatttttagtttagtattgttttaattattgaagttgatttttaaggttatttaaaaaaatttgtagcgtatattaatggatttttgttgtgtttaaattttttatagattgtattgtaaatattttatgaagtagagtatatgtatatatttatatatacgtgtatatatattagtagtattatttttggaagttttagtttttgtttttcgggattgaagttagttttgtatgataaaagtggttttgttacgggagataattgtgttttgttgggattttagataaaatttatttgtaaaaaattgataggtattaattattggaatttttaaataatgtgtttgttgatcgttttatttttcgtataaatattttaggaagtgtatgagaattttgtttttaggaatttttttaatagttaaagatagaatttaatttttgtaagtaagattcgtggaagatagtttttattttttaatgtattaagtaatcggttgttaggagtttattttgggttagaggtcgattcgtagaattagaacgttttttttttttggattgttagtaatttagtttttttttttttttaattattttcgtttttttttatttttcgtagtaataaaggtttttgaacgtgtatgttggtttttcgggagttgtttgttgaagattcgcgtttttgtcgtcgtttggtaggagttgtttgtagggttttaatttaatcggtttgttgtgatgcgtattttcgtagatgttagtacgagtcgtcgttttacgtcgttttttatcgcgttgagtttaggtaagatgagcgaggcgttgtcgttgggcgtttcggacgtcggcgttgttttggtcggtaagttgaggagcggcgatcgtagtatggtggaggtgttggtcgattattcgggcgagttggtgcgtatcgatagttttaattttttttgtttcgtgttgtttacgtattggcgttgtaataagattttgtttatcgtttttaaggtattggttcggagagggtggtgggaggataggcggaggtcggcgaggtcgggggagattcgcgagggtagcggttaggcgggcggggtcggattttggaaaggggttttcgtagtttcgggtcggtttttttagtttgggatgtgggggatgttgtgttgtcgtggcgattttcgggaggtattcgttttagttttttggggcggttttttaggagggttgaaaatattagggtgtttttaaagatatttattgggagtcggtcgggatttttttggtaggggttttagttttgatataaagtaggaaaagttataatttagttcggtagagatagttcgtttgttaatttattgttgtttttatcgttggattaatatttaaattattttgttttttttagatgaaaggattaggaaataaaatagtaagatttttttgtttttaagttagtgaaaagaaattaattagggaaattgttagggattttttttttttttttttaatcgttttataggaattagtatgtttaaagtttatagcgggcgtagttaagtttgtaaaagttttttgaagagttttttgagttttttagtttgtttttgttagaagtcgtaagtatcgaattttgttttttttttcggaatcgttttgaatgttattattagtttatttagattaagttaggggtagcgaaaggtgacgaggttgttttcggagagttaggggttttagcggttcgtttttttgttagaggagggggcggcgcgtagtcggagattttagcgcggcggttttaaagatttttttttattttttatttttgattatttttaaagttttgagttgtttttaaaaattttgatttttaataggggtatgaaaataattttaggcgtttttaaataattattttattatattagtagtaagtagtaggaatttaatttttgtagtggagattttgttttgtttttggtgggtttgaaaagatgcgattaagtaaaattagtgcgggttattttttgttcgtttaaagggcgaattaaggtaggtggttttaagtgtaaagataagttattaaaaaaaaagtttaaataattgttttttttaaagggagattaatttaatataagttttttatagttttaagttttagttgggttttgattttattataacgacgaatatttattttttaaaaaagtattgttgcggttatttttaagttttatatagtttttatatttagattgtgatttttaaaataaaacgaaatttgtagttggttgtgtttatagattggtttttttttttatttatttttttaaaagtagttttttttgtttgttttgttttttagtgggggtggaaatgaggagaaggaacgaaggaacgtggtggtttgtttgattttttttttttttttttcgtttatttagatttgggtttgggagattattttatttttaaattattttaattttttgtttaaatggatttagcgatgattttttagggtattcgtattgagaggggatttaatagggttgggttatggggttattattagataaagagtagaggtaagacgggttgataattattaaaggttattaaaatttggttgttttaatgtattagggttttaagagatttgtggtttttttttgggggggaaattagggttttttttgaatttttttttttgttagggaatttatatttaaatatattaaaagattaaatgattaataaataatttttaggaattggagtaatttagagttttaagttattatatgaaagtatttatttttttttaaaaaatgaaaaattatatatattgtttttatgagttgttagaattttttttagtagaaattataataattatagagttttttttttaaaatgatttttggtaatttatttaaaaataattaatttgttttattgagtgataatttataggttattaaaaatttaaatatagagtttttgaaaaaagtttaagtagattttttgagaatatttaggggaaaggaaaggatagtagagaaattagattatttgattattgtttgttattattttaatttttataaaaagaggtttttttttggaggagatttgtttattgtataattagaagagtagataaaatgtttagtgagatagtaaacgtgaagggataaaatgttagggataaaagtaagtaaaatattaaaatttgtttatatttcgggtttatttagtgtgtgtttttggttttattttatttgtttatttaattattttataagtagttttaatagaaattattattttaaaatttggattttaaataagtcgtaggtaatttttttaggaagttaattagtaaataattattatattttttatggtaaagagaagtaaatgtgaaataatgataaggtttgatgatattgatgaaaagattattgaaggtttttttaggaattttttgaagttttgtaggtaaattttttacgttaattttttgaattaaagagagatttaaaattatgaattttttttaaaatagattataataattttatttgtttattttgagttttaatttgttttttttttatttttttttttttatggaatatttttattttttatagtatgagagatatatgttttttattattaagaaaattttaagtttgttgtgtgttttgttgtatttatagaattagtttaaaaagttgttttgatgatttaggatgtatttggtaatattatggtgttatagtttgtttaggttttggtatattagagtttaaagacgtaaacgtgtttttagtagggaagttcggaggttttggattttgatggtaatattttttttataaaaaggaaataagtaatatttttgtcggtaagattatagtttttagttatgttttaaatattattttagttgaattttgtgttttattttatagttttttttgtaatattggaaggttaacggatttgaagtaaatgaattgtaattgtaattttaatttaattagaattggtttaaaatgttagtttggatcgtgaataggttagttaagaatagtattgggaggtttatgtaatatagaagagagttgatatttggtttaattttttgatattttaaaaatagagaagtaaaataaaatatgagatatttttggttagtaagtttttttttgtttgtttggtttgtgttaaaatgtaaatgtttgtgtttttttatttattgtttatagttttttattttagttgttttttttttttgtttgaagttagatatttttatattttttttatattgtttattagtgataaaatttgtattaaattagtacgtatgttagttttgaattaaaaagaaattttttaaatttggtttaagtatgtttgttaataattggacgatatatagtattaatgaattgttttggatttattagtttttttttatttattcgtttttattaaaaaaaaatttttagagattaatataaggttaagtgaatgatatgtaggtgtttaaatatggttgattttgttgtatttaaaaaaaaagaggagtgggagttaaatttttaatttttttttttttaagttttaatattaatagtttttttttatttagtttttatgataattttattttatgtttgtttcgatttggcgaaggttttttgaatttgttaaattattaatgaggatagtattggaaagatgagagaggtataggtttggagtattgtgaggggaatagtagtaggaggtagataatttagaatatatttttgtagttataaaagaagatttatttatttttatttttttatagatttagatttaataatgagttatttagtttgaaatttacgtagtggaggtagtttttgtatatttgttgaatgttgagttataatagagaagtttgggttattatagggagaggaggatgaggaagtaaaaatatgtgtttaaagagggtattttaatattgtgagttaattttataacgggaagtgaaaattatgaaaaaaaggggaaaatttgttgtgagagattaaaaagagtaaaataaagtaagtttatttttcgggaatagaaaaaaaaaaaaaatagtagtaataattaaataattgattagggagatttattttcgtgatatttttttaaaataaaaagggaattgtcgtattattgtttttaattaaatggtaataaatatatttataatgggaattaaatagttaattagagggtgtttggggaataaatagtagagttttaaaattttttatatggaaaatatgtttaataattggaatgaaaggattaaaaagagagaaaaggtttagattttgtttggtagtgtaagttggataaaatagaggaaaatgtttttttgtttttatgagattagattattttggtgtagttttggggttggaagtatgtttattttttatagtgagttagttcgtgttttgtgttataaggattgaagtagttttaatgaataaaaataatagatagttatttggaggttatagggaaagggtgatggttaagtagattatgaaaatgggaattttgagaaatatgatttcgatattatataagtgagtttatggtagttttttttatatatagaaaaagaggtttgaaaatatatattataaaaaattatgtagtagttattaaggtaaaaattgggaagtaggaggtagaggaaggagtgataatattagattaaggaatgttttattgttattaatttaaaaatagtaattaaaaatgatgatgtaattggaatgagtaatataaatgttattattgattttatcgtaaagaatgttagaaatgattagaataaatatagtttggggtatttcgatttgaagttgtatgattgttttgaaaaatagaaataaaggaaatatagttaatagtaaatgtttagattaagaaaatagtttttagaaggtttaaatgatagttaagaaattgatgttattgtataaagtatttttaggttatgttttttagagtattttattttggaatttatttttttaattatttgagtataaaaatatttatttattagttttttttaatagttttgataagattttatatttatttagttatattaaataaatttttggttaagattagttgggttagtagaaaattttaggtatttgtgaggatatgagtttatatacgttgagatttatagatataaaaatgtaatttaattttatttttgaattgaggggagtgtatagaagtgaatgtttcgtttttttgaggtttgttgattttgtaattagtaaacgaagggtgtatttttgattttttttttttgtgtgttagaatttattgttagtaaaatttaagataatagcgatgagtaggaggtattaaagatgaattgtagagggatagtttaagttatttaagaatcgttagtaagatgaaatttatttttagtagaaattgggtttttttgtgtttttttgttttgttttattttttaaaagtaaagtttgtattttgtttagtttgttagtggaggtttgagtaagtaaaagatgggttggattataaatttataaatataggatgttttgttttttaaacgggagaaattaagaagagatgtttgtatttaggagacggtatagttatttaaaatttttgatattttgttatggttagttttgttttaattgtgttatgtgatttattatggttttatgaggtaaatttagtatatgtgttattatttgaaaatttatatatagttatatataatgtattaggttggtgtaaatgtaattgtagtttttggagttaaaaattgtaaatattgtaattatttttgtattaatttaaaatataataaaaaagtgttttttttttataatttttttgttgttttgtttaagttattattgttatttttttgtaatttaaaaagaaattattgaatatatatttaattttagaataattattatataaatgttttaaaagtgtatgtataatatttttgatgtttgtatttgttttttgattggtgtttagg

SEQ ID NO: 506 - DNA, 12968 bp, Artificial Sequence
  chemically treated genomic DNA (Homo sapiens)
tttaaatattagttaaaggataaatgtagatattagggatgttatatatatatttttagggtatttgtgtagtgattattttaaaattaaatgtatatttaatgatttttttttaggttgtagaggaatagtaatgataatttaagtaaaataatagaaaagttataaagagaagatatttttttattatattttaggttggtgtaaaagtaattgtagtgtttgtaatttttaattttaaaaattgtagttatatttgtattaatttaatatattatgtataattatatgtaaatttttaaatagtgatatatatattaaatttattttataaagttatagtaggttatatagtatagttggaataagattaattatagtaagatattaaggattttgagtagttatgtcgttttttgaatataagtatttttttttaatttttttcgtttgagaaatagaatattttgtgtttgtaagtttataatttaatttattttttatttgtttagatttttattaataggttgaataaggtgtagattttatttttagaaaataaaataaaataaaaaaatataaaaaaatttaatttttgttaaaagtagattttattttgttgacgatttttaagtaatttaaattgtttttttatagtttatttttgatattttttatttatcgttattattttgagttttattagtaatgaattttagtatataagaaaaaaaaattagaaatgtatttttcgtttattaattataaaattaatagattttagaaagacgggatatttatttttatgtattttttttaatttaggggtggaattgggttgtatttttgtatttgtgagttttagcgtgtgtaaatttatgtttttatagatgtttgaggttttttgttagtttagttgattttgattaggaatttatttaatgtaattgagtaagtatgaagttttattagggttattggagaaaattggtagataaatgtttttatatttaggtaattaagaaaatgaattttaaagtaaaatattttgaaaagtatgatttaaagatattttgtataatagtattaattttttggttattatttaggttttttagaaattatttttttggtttagatatttattattggttgtattttttttgtttttattttttaaagtagttatataattttaaatcgaaatgttttaagttgtatttattttgattatttttgatattttttacggtaaagttagtagtgatatttatattatttattttaattatattattatttttggttgttgtttttgaattggtaatagtaaagtattttttaatttagtgttattatttttttttttgttttttattttttaatttttattttaataattgttatataattttttgtagtatatatttttaggtttttttttttatatgtaaaaaaggttgttatagatttatttgtatgatatcgaagttatgttttttaagatttttatttttatgatttgtttagttattattttttttttgtggtttttagatgattatttattgtttttatttattagaattgttttagtttttgtggtatagaatacgaattaatttattatgagagatgaatatatttttaattttaagattatattaggataatttagttttatagaagtagggaggtatttttttttattttatttaatttgtattgttaaataaggtttgggttttttttttttttttaatttttttattttaattgttggatatgttttttatataggagattttaaaattttgttatttattttttaagtattttttaattagttatttagtttttattataagtgtgtttgttgttatttaattaagagtagtgatacgataattttttttttgttttaaaaagatattacggaaataaatttttttgattagttatttggttattgttattgttttttttttttttttattttcgaaaaatgggtttgttttattttgttttttttagttttttataataaattttttttttttttttatgatttttatttttcgttgtaaagttagtttatagtgttgaaatgttttttttgaatatatatttttatttttttatttttttttttttgtggtaatttaggtttttttattgtaatttaatatttagtaggtatatagagattgtttttattacgtgggttttaaattgaataatttattgttgggtttggatttgtaaaaaggtgaaaataaataaatttttttttataattataggaatgtattttgaattatttgttttttattgttgttttttttatagtgttttaagtttgtgttttttttatttttttaatattatttttattggtaatttggtaaatttaggagattttcgttaagtcgaaataaatatagaataaaattattatggaggttaaataagaaaaggttgttgatgttggaatttaagaagaaaaaaattagaagtttaatttttatttttttttttttttaaatgtagtagaattaattatatttgggtatttatatattatttatttggttttgtattgatttttgagggtttttttttggtggaggcgggtgggtaaaggggaattagtaaatttagggtaatttattaatattgtatatcgtttaattgttaataagtatatttaagttaggtttaaaaagtttttttttaatttaaaattaatatgcgtgttaatttgatataggttttgttattgatgggtaatatggagagaatgtaaaaatatttaattttaaatagaaaaaagaaataattggaatgaaaagttataaataataggtaaggaaatataaatatttatattttaatatagattaaataggtaagaagggatttgttggttaaagatattttatattttgttttatttttttgtttttaaagtattaggaagttgggttaaatattaatttttttttatattatatggattttttaatattgtttttggttagtttgtttacggtttaaattggtattttaaattaattttaattaggttgaaattatagttataatttatttattttaaattcgttaattttttagtgttgtaaagaaggttgtggagtggaatatagaatttagttgagatgatatttaaggtatagttagggattgtgattttgtcgataaaaatattatttattttttttttatgaaaagaatattattattagaatttaagattttcgaatttttttgttgaaggtacgtttacgtttttggattttggtgtattagggtttgaataagttataatattatggtattattaaatatattttaagttattaaaatagttttttaggttaattttgtaagtatagtaaaatatatagtaaatttaaggtttttttagtagtaaaaaatatgtattttttatattgtaaaaaataaaggtgttttatgggagggaaggagtagggggagaataggttggggtttaaaataagtaagtagggttattgtaatttattttaaagaaaatttataattttaaatttttttttagtttagaagattgacgtagaggatttatttatagaattttaggagatttttaagaaggtttttagtgatttttttattaatattattaggttttattattgttttatatttgtttttttttattatagggaatataataattatttattggttaattttttagggagattgtttgcggtttatttaagatttaaattttaaagtaataatttttgttgaagttgtttgtgaggtggttgggtgggtagatagagtgaagttagggatatatattaaatgagttcgggatgtaggtaggttttgatgttttgtttgtttttatttttaatattttatttttttacgtttattgttttattgaatattttgtttatttttttagttatgtagtgagtaggttttttttaggaagaagtttttttttatgaggattggggtggtgatagataataattaaatggtttgatttttttgttattttttttttttttttaaatgtttttaggggatttgtttgaattttttttaagagttttgtatttggatttttagtagtttatagattattatttaataaaataaattaattgtttttaagtgaattgttaaaagttattttaaaaaggaaattttatggttattatggtttttgttagaaagaattttgatagtttataaaagtaatatgtataattttttattttttagaagaaaataaatatttttatgtaatggtttgagattttgaattgttttaatttttgaagattatttattaattatttagttttttaatatatttgagtgtgggttttttggtagaggagggagtttagaagagattttgattttttttttaaaaggaagttataaattttttagagttttagtgtattggggtagttaggttttaatggtttttggtggttattagttcgttttgtttttgttttttatttgatagtgattttatggtttaattttgttgggtttttttttaatgcgggtgttttaaagagttatcgttgagtttatttaggtaaagggttagaatgatttaaaagtaaaatggttttttaaatttaaatttaagtaaacggagggagggaaaaaagagttaagtaagttattacgttttttcgttttttttttttatttttatttttattaaaaaataaaataaataaaaaaaattgtttttagaaaagtgagtggaaaaagaggttaatttatagatatagttaattgtaaatttcgttttgttttagaaattataatttaagtgtggaaattgtataaagtttaaaaataatcgtaataatatttttttaaaaagtgaatattcgtcgttgtaataagattaagatttagttgaggtttggaattataaaaagtttatattaaattaatttttttttaaaggggataattatttaaattttttttttagtagtttatttttatatttggaattatttgttttgattcgttttttaaacgaataggaaatgattcgtattgattttatttagtcgtatttttttaaatttattaaagataaaatagaatttttattgtagaaattaaatttttattgtttgttgttagtgtagtagggtgattgtttagaaacgtttggggttgtttttatatttttgttgaaggttaaggtttttaaaggtagtttaaagttttggggatgattaggggtgaaaagtgaagggagatttttggagtcgtcgcgttgaagttttcggttacgcgtcgtttttttttttagtaggaaagcgggtcgttgggatttttggtttttcgaaaatagtttcgttatttttcgttatttttggtttaatttaggtgagttgatgatagtatttagaacggtttcgggaaaagaaataggattcgatatttgcggtttttggtaggagtaggttaaaaagtttagagaattttttagaaaatttttgtaaatttaattacgttcgttgtggattttggatatgttaatttttatagggcggttagagaaggggaaaaaaaatttttgatagtttttttagttagtttttttttattgatttgaaggtagaaaagttttattattttattttttgatttttttatttgaggaagataaaatggtttgggtgttaatttagcggtaggggtagtagtaagttagtagacgggttgtttttgtcgggttgggttataattttttttattttgtattaaagttaaggtttttgttagggaggtttcgatcggtttttagtggatatttttggggatattttgatgtttttagtttttttgggaggtcgttttagaaagttgagacgagtgtttttcgagggtcgttacggtaatatagtattttttatattttaagttaggaagatcgattcggggttgcgggggtttttttttagaattcggtttcgttcgtttggtcgttgttttcgcggatttttttcggtttcgtcggttttcgtttgtttttttattatttttttcgggttagtattttgaaagcgatgggtagggttttgttgtagcgttagtgcgtaggtagtacggagtagaggaagttggggttgtcggtgcgtattagttcgttcgggtggtcggttagtatttttattatgttgcggtcgtcgttttttagtttgtcggttagggtagcgtcggcgttcggggcgtttagcggtaacgtttcgtttattttgtttgggtttagcgcggtggaaggcggcgtgaagcggcggttcgtgttggtatttacggggatacgtattataataagtcgattgagttaggattttgtaaatagtttttattagacggcgataggggcgcggatttttagtaagtagttttcgggagattaatatatacgtttaggggtttttattattgcggggggtgggggggggcgggggtggttaggggaggagggagattaagttattaatagtttaggaggggaaaacgttttggttttgcggatcggtttttgatttaggatgggtttttagtaatcgattgtttagtgtattaaaaagtggagattattttttacgaattttgtttgtagaggttaagttttgtttttggttgttagaaaagtttttgaaggtaaaatttttatatattttttaaaatatttatgcgaagagtaaaacgattagtaaatatattatttggaagttttagtagttaatgtttgttagttttttgtaggtgagttttgtttaaagttttaatagaatataattatttttcgtaataaggttatttttattatgtaaaattggttttagtttcgaaaagtaagagttgagatttttaaaggtagtgttattaatgtatgtgtacgtatatataaatatatatatatgttttattttataaaatatttataatataatttgtggagaatttaaatataatagaaatttattaatgtacgttgtagatttttttaagtagttttgaaaattagttttagtagttggagtagtgttgagttagaagtatttgttatgttttttgtttttttaatgaattttgttaaaacgtttagtgtagaaaatttagcgttttagagatttttagttaattttaaaataataattataagaaggtttagtcgatgatatttagggttttatagtttttttatatttgtgaattcgggtttggggatgttggttaagtttgtggttggttttttggtttgttgggagttgagtagtcgtagagttatatatatgtaaatacgtatttttcggaaggtagttattgtttatattagttgggtgatttagttttgattcgggtagtagcgagacgatatttttttatcgtcgtttagtattcgtcggttagttgtttcgaggtacgaatatttacgagcgtcgcgtaatcgtagtaggtggagcgggttttgagggagggtttcgcggcgtagatcgaaatagatcgggcggttcgggttatatacgtacgtatattttgttacgtatattgttacgtatacgtaattttacggttcgtttcggattatagagtattttttttttttgttgtaaaaggaaaataattggggaaaagttcgtagttaggaaagaagttgaaaatatttagttaagaagttagttaatttaaaaggaagaaaggggaaaaataaaaaaaaataataaaaaaaggaaggtttaacgtaggttaaggagaagtagtagaggttgatttttttttggcgtttttaggagtttcggaaagaagtgtttggcggcgtagggtcgggtagcgtggtgttttggttgggttcggtcgcggggcgttcgtttcgttcgcgttcgttggttttatgaatgagagtgtttggaaatgaacgtgtttttattgtaagttcggtcggaggaattttatttttttagttcgtttgtataggggcggtcggcggttaattataggttttttcggtattagttagggcgcggttcgtcgtcgtcggtttttggaattggttcgcgcgttttcgtcgtcgcgtcgcgcgttattgtacgtagttcgggcggggagtcggaggttattttcgcgtttcgtatttaagtttgtatgttggttcggggtttcgttcgcgtgcggattttttttcgtagttatacgtaggtttgtgcggtttcgcgagtggttacggttcggagatttggaaaaagaaagtaggtttcgtcggttcgaggaggattcggtcggcgcgtcgtattcggagaggttcggtttcgcgagtcgttgtaggtaggcgtagtggtcgttacgaggttttcgaatcgggttgtagttcgcggacggttttagattttgcgcggtcgtttagggttaggttttcgtttttagggcgggggtgcgatttggtcgcggggttcgggggagttatttcgcgtttttgtatcgttcggttggtagttgcggcgaagcggcgttgattttttgtatgaggtcggacggcgttcgcgcgtgtcgtttgtttttagcgtttttttttgggtcggtttttgtaatgggtgttttttatcgttgcgttcgggtcgcggttcgattttttcgcgcgttttatttgttgcgtgcgttagcggttagcgaagagttttttagttaggaaagattttaagaacgcgcggttggaaggaaagttgaaagtagttacgcggtttgttttcgggttttgtagcgtcggtattcgtagtagtcggatagtttgttcgggtttcgcgtttttttttcggtttttcggaagcggttttcgttttttttttcgttttcgtgcgttcgagcggttttaggtgcggaatttatttcggtttcgcgtgcgggcggtcgtttttttttgcgtcggttttcgcggtgttgcgggtattttcgcggagttcggagggtttcgttttcggttcggcgtgcgttgttaatttcgatttcgttcggcggggtttttttttagcggaggttgttttcgttattatgagtttttttacgttttttttgtcgggttttgtatttttcggggttttttatttatttcggggttgtaatttagttttcggatttcggtttcgttttatcgcgggttgttttgtggttttcgcggagttttttaattaagtttttcggcgcgggggtttttcgtcgattttacggggtttttgacgttcgttttttttttttttagggttagggtgttgtggtcgttgtcgcgtagggattgttttcgggcgttgtcgcgggttcggacgtaggagggggtcggggttgattggcgtggaggtttttttcgggcgggttcggattgcgcggagttgtcgggacgcgtcgcgggttttggcggacgttagggggtagtagtcgttttttttggacgtcgcgcgtagttttcggagttttcggaacgttttcgacggcgcggggttgtgcggttcgtttcgtggttttcgggtcgttcgggaagaattagcgttcgaggataaaagataggaagtcgttttagagtttatttgagttggaacggttaaggcgcgttttcgaggttttaatatagagtcgtagtcggttaggtggggattttcggattaggttttttcgttgtgcggttcggtcggggttttttttcgaagtttttgtttttggggtttgattcgggtcgtttttggttatttgtgttttaggagttcgggttttcggggggttaaggcgggcggttcgcggttttaatttttttcgttttcgttttttttgggtattgttagtattcgagtttagttttgttttaatggatttggggtttcggaaagaaaatttattatattttttttttaaaatgatttttttaagtttaattttagttgtaaattttttttttttttcgtttaaacgtttattttttaattttgtttttgagaagagtgtatcgcgcgcgttcgttcgttcgtaggggtcgtagcgtttttgtttgcgggttcggacgcggttcgttttagaggtaagttttgggtaagggaaattttttcgtttggtttttaatgtattttttcgagattttatttagggtttttggggttatttttacgtgtatttttcggaattttcgagatgcgggagggagtacgagggtgtggcggttttaaaagtaggtttttgattttaggggaaatagtagattcgggtgatttgtttttcggaaaggtttagggaggtttttttgggtttcgggtcgtttgtttaaaattttaaatttcgcgacgggggttgcgagtcggattcgggttgcggttttttaggagggagttaagtttttttatcgagtaaggaaagttggttttagttttgtatgtatcgagtttagtcgttagaggtagcgtcgtgggagttgtttagttaggagttttaatcgataaatttcgagtttgaagttcgataaaaagttgatagtaattatagtttttgttttttgattcgatgggatcgcgggatatttgggttttttcggagcggcgtaggttgttaattgcgtagcgcggtgtttttttgaaaagaagaaatagattaatttttgtttttttttattgaggatttaaaatgaatggaaagaggtaggggtttcggggaaagggaattttttagtcggtcgggtattttacggagtttgtatttttaaggatagttatagcgtgtacgaagtgaggaatttttttttattaagagcgtttattttagcgataatatagaatttttttttttttgtttaagggagaaaggaaaggaaatattattaggtttatttttagtgtttttttggagtaatgttagaatttatttttgttataatgtaaaattaaaaaaaaaaaaaatataacgaagcgatacgttgggcggatgttacgtgatagatttttttaaattttgttgcggggagagggagggaggagaattgaaaacggtttataataggaatgaaatgtatatttttgtagtggatttaaaaagtattgtttggttagttggaagaaaaataattttattggaaaatagtaatagtgtattgacgttttttttttataattttaggtaaagaattataggtggttttagaagataattaaattttttatttttttgtttttttaaaagtttttttaaaatatgtataaagatgggattagaattttaataatttttttaaaattattttttgcgagtaatatatttttaaaattatatttgtaaaaatgtagtacgtttaaaagaattatttttattttaaatgattatttatattttaaaaaatagaatgtattttgttatggtttggaattaaatagttgtagtttgtattgatgttatagggatggaaaataattttgatgaagagtaatatgtatgtataaattatttgttatatatattatttagttttgaatattggaatttaattaaatattttttttttttgaagtggttttgagattattttattttttaaatttaattattatgagaggggggaggagagtttttagtttttttattatattttttttttatttgaatgtttttgtgggatgttatggttaatgtgtgatgattttatttttattttataaatttattgtgtattttataagtagtaagttgaggatattttaaaattaatttttttaaaatttaggaatgtttagtaaatattttatttttataaaaattttgtattattattgttataatataggtaataagttgggttgtgagggaagttaagttttgttttgtttttagagagttgtatagaggtatttaatagtattagaatgtatttatggtaaacgttgtagaattgagggtattatttaagtttttattgaaatattttatatggtataatatttataatatggagaattgtttttaagtatattggaattagtagaaatagttttaattatttggttaaattatattataagttatatatagagatatatagatataaaattatatatatatttatgaaggtgtgtattttatttaaaaatataatttggaatttaatatatcgtggacgtttttagaaggatttattttaagtatgtattttgaaataatagaaagtaggaaaataaaagtaatgtaagtttaaaaattaattttttttcgatttttttttttttgttagtttatttttttttatattttttagtattggagatttttatagttttgatataaaaatgatttgaaatagtaaattattaaataagaaataaattgttttttatgtacgtggttttaggtatttttaattaatgtttttttttattagttaatattgaatatttgttatagaattattttttttaagtttcgtgtgtgattaaaatgtgatttatttaatgaagatttaaaatatatttggaaggtgtaggaatattagaatttaagggaaaattaaaattaaattttaatttaacgtaaaaatatttatgattatttatttttaatgataggatattttagaaatatttttttttgtttatttttttttttttttttttgttaggtaggtaaattatttatatcgaaattttttataagttttaatagattatattaattattattagaaataattgttatatgataatttttaaatatggattatttatagtatatatttataattataggtaaatttattaagtaaagttatatgaagtttttttttttttttttgaatatttatatataatgttgtgaatttgaaattattttattagttttgtatattgataatagtattgagttataaagag

SEQ ID NO: 507 - DNA, 4654 bp, Artificial Sequence
  chemically treated genomic DNA (Homo sapiens)
atagatgttttgtatagttattatttggtagtagagaaattttttaagtttattttattatatgtgatgtttatatttttttgtaagtattcgtatattttatatttttaatgggtttgatttttaggatttatattaaaggattttttttatttgttaatggtagtgatattttagttttagtaagaggtttttgttttggagatatttaggtttattttttttaatttttttaaaaaataattttaatttttattttagatttatggagtataaatgtaggtttgttatttggatatgttgtgtgatgttgaggtttgggatatagagaattttattatttaggtagtgagtatagtatttgatattatgttttttagtttatgtttgttttttttttttttttttttagtagttttagtgtttgttgtttttatttttttttttttttttttttttttgagacggagtttcgttttgtcgttaggttggagtgtagtggtgtgattatggtttattgtaatttttatttttcgagtttaagcgatttttttgttttagttttttgagtagttgggattataggtgtgtattattaagtttagttaatttttgtatttttagtagagatgggattttatcgtgttggttaggatggtttttaatttttgattttataattcgttcgtttcggttttttaaattgttgggattataggaatgagttattgtgtttggtttatgttattatattttattataattaaaaaatataaggaattatagaaaaagtaaggaagttatttataattttatataatatttttttatttttagtttttattgttaattataattttttggagaagtaaatggagaaagtatattgtaggttaatttatgtttgaggtagtttattttagttatagaaaggggatggatttaagtaggataaaaggagaggtagggaggttggtgatgtagtgatagtaataaggtaaaagataatgaaagttttaattagttagttttttgttaaaagatagatattagaaatatattgagaatttaaatatgtttggtgcgtgattaatgataaagatgaagaggaagaaatttaggtatttagttttagaaatttagcgatgtattattatttgagattagatatatagggaaattgaaatttaataatttaattagaaattttaaatatttttattaaaattttaaataatttgattataattgttaattgggaatgtgattatagtggtttgtaatttgttaatttggttaaaatggttattttttagattgtttttttttatatgtttttggttggggtaaatcgtaagagatattttgtgtgagttttgtaaggtggaagtgaagtagtatttagaatgttttgatatgtaaagggttggtgtaggagtattaggtattaatgtagtttacgtgtacgtgatattatttatttgttgttttatttttttggtatggggtagtagttagttttgtagttagtttttttatttttttttggatttttttttagtttttttaatttttgagtcggggagtatttagttttaagataaagtgtgttagttttttttgtagatatttatattattaaagttagaggtaagagagattgatataggatttatttatttttttgggttttggttggtggttttaggatttagtttgttttttttttttttttttatttatatgtatttttttattttttgattgttagttatgtaaattttatgttttagtatgagatataaagataatagttttatagagattggataattatattttataattgtgtaaggtttaatttttggtggttttgtttttttgataaattttgatagagaatttggtagtagataagattttaggggtatagaatttgaagaatgagttgtttaaataggttttaggttatttggaatttattttttgatttttttaatgttttgtttttaatggttaagaggatattagtattatgtagtggtaaatagttatataaattattatattgatatttttaattaaatgtttatggaacgacggttggtaaattttttttgaaaagggatagatgataaatattttaggtattggaagttatatagtttttgttgtatatattttatttagattttgtatagtttttgtttttatttaattttgtggttgtagtataaaaataattatagatatatgtgtatgaatgaacgtggttatgttttaataaaattttatttataaaaataggggtaagttagatttggtttaggagttatagtttgttgatttttgttatagaaggaaagttttggatgaataagtatttgttgttatagaatattttagtgaaaatataaattataatgggattgattaattgtttttaagtgtgttggagaattttagaaaagaaaatgatgagttttgggttttatatttttagtttaaggtttatataaggaagttaaatttttttatgattattttaaaagaattttgattgatatagtgatgattgaattaaaattagtagatgttttgtaggttaattttaaaaagaagtaataaatttgtaggggagttaatttgggatatgttaagttggaggtgttaatgaagcgtttaagtggtgacgtttggtagatagtaggatgtatagtttgaaattttgggagaaatgtttatttggaaattatttatacgtatttaattgttataattataagaataaaagaggtaataaggaaaatgagagagagagagaaagagagagagagagaaagagagagagagagaaagtgtaggaggttaaagtagattttaagaaatttaatatttagtggagggataggggacgaggggttcgtaaaagagtttgagaagttgaagattttagaagagagtagtatcgttaagattaaggaattggagtgtattaagaaattgcgagtgaatgtaataaaattgtatatggtagaggttgagaaagttttaagttaaaattgaaataaaagatttattgtttttaaaagaaataattggagaggaaaggtaaggtgatgaatttttatgaggtgtgttattaggaatattatttattttataagtatttttttttttaaagaggaatattttttttaatagtttaatttagggtggtgtaaagaagttttttttttttttttgaagggtttttttaaatgtttattttatgtataaagaattattatgtttttaattgagtagatgttttggataattttttgaaggaagatcgtttagattagtttaatgaaatagatatttttcgcgtattgacggaaatattggcggtatatattgaggtcgtattttaggattagatttgtcggttcgaatatacgcgataagagtaaagaagttaaaagagaagtgtttgtgtggttttttttacgtgggtgaaggattgtgttagttgagaggtggtagagtaggaagttgtttgaggatttttatttatttggtgaaaaattgggtttcgtttttaagagagtaagtcgagggtcgtgtaggagttggaggagagaaatgaaattttggaagagttagtagaaggtgggaaatttttattttatttatagtagtatagattttatgtagttaaaagtatgaatgtttttttttttgtgatttatattgtaaagggagtattttttttatgtgtaaattaattatagtggatatgtttgtttatatttagattagtttttagatttaaaatttgtttttgtttttgtttttgttttttttttttttttttgagatggagttttattttgttatttaggttggagtgtagtggttttgttttggtttattgaaattttcgtttttcgggtttaagtgatttttttgttttaatttttggaatagttgggattataggtatgaattattatggttggttagtttttgtatttttaatagagatggggttttattatgttgggtaggttggtttttaatttttgaatttaggtgatttttttattttggttttttaaagtgttgggattataagcgtgagtgagttatggcgttcggttatgtatttgttttataattatgagaaattaaaattaaaagtttatttgtagatttttttagtgggttataaaatttggaatatttttgaagaaattatttttgttatatatatatagatatatatatagagagatatatatatagcgtaggtgatagttttttggtaatttaattatgaagtatagtttttagaatatttttattgatgaaagattaaattatagtgattttgtgtgaattttggtgtgtatgcgtgtttttgtgtgtgttgtataaatatatatatatattttattttaaaattagagaagaatttgattttgaaagagtaattgataaattttatttttagggagattcgttgttaaaagggaaaaattattttgtttggttttattaaatattatttttcgtttattcgttatttagtaattagagtgattttttagaaatataattgggttatattatttttttgttgaaaatttttaatggagagtatttatta

SEQ ID NO: 508 - DNA, 4654 bp, Artificial Sequence
  chemically treated genomic DNA (Homo sapiens)
tggtgaatattttttattgggagtttttagtagaagagtgatatgatttaattatgtttttaagagattattttggttgttgagtggcgaatagacgggagatggtatttggtgagattagataggatggttttttttttttggtagcgaatttttttggaaataaaatttgttagttgtttttttaaaattaggtttttttttgattttaaggtgaaatatatatatatatttatataatatatatagaaatacgtatatatattagagtttatatagaattattgtagtttgattttttattagtgaaaatattttaaaaattatattttatagttgagttattaaagagttgttatttgcgttgtgtgtgtgtttttttgtgtatgtgtttgtgtgtgtgtagtagaaataatttttttagaaatattttagattttataatttattgggagaatttataaatagatttttgattttagttttttatggttataaaataaatatatggtcgggcgttatggtttatttacgtttgtaattttagtattttgggaggttaaagtgggaggattatttgagtttaggagttggagattagtttgtttaatatggtgaaattttatttttattaaaaatgtaaaaattagttagttatggtggtttatgtttgtagttttagttattttagaggttgaggtaggagaattatttgaattcgggaggcggaggttttagtgagttaagatagaattattgtattttagtttgggtgatagggtgagattttattttaaaaaaagaaaaaaaaaataaaaataaaaataaagataagttttgaatttaggaattggtttggatgtagataaatatgtttattatggttagtttgtatataagagaaatgttttttttatagtgtaagttatagaagaaagggtatttatatttttggttgtatgaagtttgtattgttgtaaatgaaataaaaattttttattttttgttgatttttttaaaattttattttttttttttaatttttatacggttttcgatttgtttttttaagggcggagtttagttttttattaaataaatggaggtttttaggtagttttttgttttattattttttagttggtatagttttttatttacgtggaaggagttatatagatattttttttttaatttttttgtttttgtcgcgtgtgttcgaatcggtaggtttgattttgaaatacggttttaatatgtgtcgttagtgttttcgttagtacgcgaaggatgtttgttttattaagttggtttaaacgatttttttttaaaggattatttaaggtatttatttaattaaaaatatgatagttttttgtatataaaataaatatttgaaaaaattttttaaaaaaaaaaaaaaagtttttttgtattattttgagttaagttgttaagagaggtatttttttttaaagaaaggaatgtttatggaatgaatggtgtttttggtgatatattttataaaaatttattattttgttttttttttttagttgttttttttgaaggtagtggattttttgttttaattttgatttaggatttttttaatttttgttatgtgtagttttattgtatttattcgtagttttttgatatattttagttttttgattttggcgatgttatttttttttggggtttttaattttttaggtttttttacgggtttttcgttttttgtttttttattgaatgttgggttttttagggtttgttttagttttttgtatttttttttttttttttttttttttttttttttttttttttttttttttattttttttgttattttttttatttttgtgattataataattgagtacgtgtgagtgatttttaaatggatattttttttagagttttagattatgtattttattgtttgttaagcgttattatttggacgttttattgatatttttaatttggtatgttttaaattaatttttttataaatttattgtttttttttaaagttagtttgtaaaatatttattgattttagtttagttattattgtattagttagaatttttttagggtaattatagaagagtttagtttttttatatagattttgagttaagaatgtaaagtttagagtttattatttttttttttgaagttttttagtatatttagaagtaattaattaattttattatggtttgtatttttattgaaatattttatggtagtaaatatttgtttatttaaagttttttttttatagtagaagttagtaagttatgatttttgagttaaatttggtttgtttttatttttgtaaataaagttttattggaatatagttacgtttatttatatatatatgtttgtggttgtttttgtgttataattatagagttgagtagagatagagattatgtagagtttaggtggagtgtatgtagtagagattatgtggtttttaatgtttaaaatatttattatttgtttttttttagaaaaagtttgttaatcgtcgttttataggtatttgattaaaggtgttaatgtgataatttgtgtaattgtttgttattgtataatattaatgtttttttaattattggaaatagggtattaggaaaattagaggatgaattttaagtaatttggaatttgtttagataatttattttttaggttttatatttttggaattttgtttgttattaaattttttattagggtttgttagggaagtaaaattattagaagttgaattttatataattgtgagatgtgattatttagtttttgtgaggttgttgtttttgtgttttatgttggagtatgaagtttgtatgattggtagttaggaagtgggaagatgtatgtaaatggagaaaaggaggaggaataagttgaattttagaattattaattagaatttagaaagatggatggattttgtgttagttttttttatttttaattttgatgatgtgggtgtttataggagaagttggtatattttgttttggagttaaatatttttcggtttaagagttagaaaagttgaaggaagatttaggaggaggtggagaagttaattgtaggattggttgttgttttatgttaaggagatgaagtagtagataagtgatattacgtatacgtgagttgtattggtgtttagtgtttttgtattaattttttgtatgttaaaatattttgggtgttgttttatttttattttgtagaatttatataaaatgttttttacggtttattttagttagaaatatatgaggaagagtagtttgggaaatagttattttaattaagttaataaattataaattattataattatatttttaattagtaattgtaattaagttatttaaaattttagtgaaaatatttaaaatttttaattaaattattaaattttagtttttttgtgtatttggttttaagtaatggtgtatcgttaagtttttaaagttaggtatttagatttttttttttttatttttattattagttacgtattaaatatatttaggtttttaatgtgtttttaatgtttgttttttagtagagagttagttagttaaggtttttattattttttgttttattgttgttattgtattattagtttttttgtttttttttttgttttgtttaaatttattttttttttatggttggaataagttgttttaaatataaattaatttgtaatatgttttttttatttatttttttagaaagttatgattgatagtggagattgggagtagggggatattgtgtaaggttatgagtagtttttttgttttttttgtagttttttgtgttttttaattgtggtaaaatataatagtataggttaggtatagtggtttatttttgtaattttagtagtttgggaggtcgaggcgggcggattatgaggttaagaattggagattattttggttaatacggtgaaattttatttttattaaaaatataaaaattagttgggtttgatggtgtatatttgtagttttagttatttaggaggttgaggtaagagaatcgtttgaattcgggagatggaggttgtagtgagttatgattatattattgtattttagtttggcgatagagcgagatttcgttttaaagaaaagaaagaaagaaaagagatgggaataatagatattgggattattagagaggggagagaaggaggtaggtatgggttgaagagtatagtattaggtattatgtttattatttgggtgatgggattttttgtattttaaattttagtattatataatatatttaagtaataaatttgtatttgtattttatgaatttaaaataaaagttgaaattattttttaaagaagttaaaaaaaataaatttaggtgtttttaaggtaaggattttttgttaaggttgggatattattattattggtaagtgggagagattttttagtgtaggttttggggattaggtttattgggggtgtagaatatacgaatgtttgtagaagaatgtaagtattatatgtaatagagtagatttgggaaatttttttattgttaggtgatgattatatagggtatttat

SEQ ID NO: 509 - DNA, 5986 bp, Artificial Sequence
  chemically treated genomic DNA (Homo sapiens)
ttagtttttgtgtatatggtatatattttttataggtaaggattttgataaatatttttttattttttatattgttgagaataatgttttggataatattttatatatggtattgattattgtttaaaattttttaatgttttaatggttttttatatcgttaggttaataataaaagttttatttatgtttatttggttttatttgatttgatgcgttttttttttttttttttttttttaagatagagttttattttgtttttttcgggttggagtgtagtggtacgattttggtttattataattttcgttttttaggtttaagtaatttttttgttttagtttttcgattagttgggattataggcgtgtgttattatgtttagttaatttttgtattattagtagagatagggttttattatgttggttaggttggttttgaatttttgattttaagtgatttatttattttggttttttaaagtgttaggattataggcgtgagtatcgtgtttagttttgatgtttttgttattattttttatttgtttcgttttatttattatgggtttttttgttgttttttgaatatattaggtaagattttattttagagatattttatttgttttttttttagatagttgtatggttgtttttttatgtttttagggttttttttaaaggttattttttttgtgtgtgtgagatggagttttattttgttttttaggttggtgtgtagtggtaagattttggtttattgtaattttcgttttttgtgtttaagttattattttgttttagttttttgagtagttgggattataggtttgtattattatgtttagttaatgtttgtatttgtagtagagatgagttttattatgttggttaggttggttttgaatttttgatattaagtgatttatttgtttttgttttttaaagtgttgggattataggtgtgagttattgtatttggttttaaaggttattttttttatgaggttttttttgattatttatttatattgtgatttttgaaatattttttttttttttttcgtttattgtttttttatagtattttttatttttttatatagtatgtattttttttatgtgttgtgtttattttttgtttttttttttttttttggaatgttagtattattttagtttaaatttgtttgtttatttttgtgtttttagagtttaaggataatgtttggtatagaggaggtatttaataaatatttgttgaaagaaagaaggaataagtaaattaatagaaggtgtttcgtaaatatttgtgaaattgaattaaaagtgttagaaggagatgattgtgaaatttttaaagtttaaaaatatgtgagtttagaagaatggtggagttgagtgttgttttattataaatattttcgaggaaggattgaaattgtgtgtttgcggtgggaggggtagttgggtaaggaatcgtgaattttcgtagaaatatttggggttgtagaatttgggtgagagcgttgtatttgggagttggcgacgttggcggtttgtttatttattttatttgaatatttgtttatgatataggtgtttttttttaagttattttggtttttgtttttttttttaggttgtgaagattatagaaatttgggatggtttatgggacgttttttagttttaagtaggaaaatagtagtgaaaatggtaattaaaatattacgtaggattgggggttttggggaaatagtttattttagagtagtgtagtgtagagtttttcgttttttattagggtttatttttaatattgtttatttgaaaattttttttttggtttattcgtttgtagttgtttattttgtagaaggatggcgttttgatttttacgttttttgtttttttagggattttatagtatttttttttacgcgtcgtcgttattatagtagacgtttgcgtttttattatttgttgtatagattttcggtgttttgattgtaaataaaatattttagattattgtgaggtcgatgtaagtatagtttttttgttggtagttagattttttaaggtggtgtgattgtgatttgtttatttttcgagattaataataataaagcgataaaatggtgtttttatatattagttgaaagatttagtatgtgaaggggatcgaagtgtttattttttatttttatataagatatgaattttatgagtaaaattaaatttttgtggtaaggtgaattattttagaatgtttttatttatatatatgtggtagtttgggtgtttatgtatatggatagatgtatatatatagagtttttgtgttgtttagtaattgttttaaaatttggataattatttaatttttagggtaaggtataaattatggtagggaggtttattttaatttttttgtttttttttttttagtttgtagtttaataaattgatagttttaaaagtagaaaaattaaagaggatgagattttttgtttgattttaggtgaatttttttttgttagttaggtaggaagttttgatttgaaaattagttttgggtattgttttttttattgttttttgggtattaatttttgttttttaattttagttgaattagtggatggtgatattataggtttaagatagttgtatttaaatattagtgattataggttatattaaggaaatatttgtaggtaatttagggtttgggaaggagttatttttagttatttgtaagatagtaggatttgtagattatagtataattaaatttagataaaattttgaattagtgagaattattaggaaggaaaggaatagaaaatgaattaatttgagtgttaggagatttgtatttagttttgatttcggtattaatcgaatgtatgtttttggataggaaatttttttgagtttcgatttttttcgtggtaaaaaggagagggttaaattatagggtttcgagggttttttttagttgttatattttggagcgtatgagatgaggtaggtatataaagtggataagatgtggttaagaaaataagttatatattaagtttatttgtagtataggtgtttaagaaaattttgttgttgtgtaatattagaacggaaggttggtttttagtaaaatgtattaattttggtttaaattaagatgatgggtatcgggtatgggggtggggaggtagttgaagatttattgagttttgttttagggtagttttgtttatcgttttattttattttttattacggtgtttaagtttatattgagagagaaatttttagttgtaaaagggagaagagaaacgttggaatattagtatcggacgttaggatatggttgtggtgttttaaaaattattttattatttggagtttgatttcgaggggagtatttttattttttagttttttgaaagtatttattagtatttgaatattgttttgagtttgttggagtagtgaaatttggtgagagagaagggtggaggaaggaaggagttgttgtatttggcggttggatttaggtagaggaaattgttataatttcgggaaagaatagaaaagtagaaagggacgagtttttatacgtagttaatgtttatggttttaattgtgtttgggaaggaagattttgggttaggggtgtattttcgttttttaaaattaaacgtgtttgagatagttataaagtttattaagggatttgagagattagagttttttgttttttttttttaattttgagttttttttttatttttattgagggagagtttgagtttatgataagtgtcgcgtttatttttggttaatttttaaaagaaagacgttcgttttggttttttttttaggtttttagtttttttagggatggtagaaatttttgggttaaggttgagcgaattattgtttattgtttttattagtttttagtaaaggtacgtcggcgggggggcgtttagtttttttagtaaacgtttcgcggtttttttcgtagattacgaggtgggggtcgttggggagggtcgagttgggggtagttcgttatttcggtttttagcgagttgtcggcgattttcgcggttttttggtttaggtttcggtttttcgggcgaggagcgggagggaggtcggggtttaggcgtcgcggcgaattcgttaacgtagcgtcgggtttcgaattttaggtttcgttttaggttttcggtcgtttggttagtttgtttgttttaattttaattttttcgaggttagttagagtaggtttgttggtagtagtatttttttagtagttacgcgattagttaatttttcggcggcgttcggggaggcggcgcgttcgggaacgaggggaggtggcggaatcgcgtcggggttattttaaggtcgcgttcgttagtttcggcggggcggttttcgtcgtcgtaattaatggatttttttttttgtttaaatagattcgtcgtgttaattattttttttttcgttagttttttttttatcgttatattgggttattaaaaaaagggggttcgttttttcggggtgttttttttttttttttttgttttcgtttgtttacggttttgcgatttcgacgtcggtaaggtttggagagcggttgggttcgcgggattcgcgggtttgtattcgtttagattcggacgggttttgttatttttttcgtttgtttggttttttttttttttcgttttttcgttcgttagtttatttgattagcggagattcggcggtcgggtcggggttttttcgtagtttttgcgcgtttttagagttcgggtcgtggttcgtcggggtttgtgttttttggtttcgagggtagtcgttgggttttcgagaggggttcgggttgcgtaggggcgttttgttttgttcggttttgtttttttgagagtgcgagagaggcggtcgtgtagattcgggagaaagatgttaaacgtgcgagtgtttaacgggagttttagtttggagcggatggacgttaggtaggcggagtattttaagttttcggtttgtaggaattttttcggttcggtggattacgaagagttaattcgggatttggagaagtattgtagagatatggaagaggcgagttagcgtaagtggaatttcgatttttagaattataaatttttagagggtaagtacgagtggtaagaggtggagaagggtagtttgttcgagttttattatagattttcgcggttttttaaaggtgtttgtaaggtgtcggcgtaggagagttaggatgttagcgggagtcgttcggcggcgtttttaattggggtttcggttaattttgaggatacgtatttggtggatttaaagattgattcgtcggatagttagacggggttagcggagtaatgcgtaggaataaggaagcgatttgtaatcgacggtaatgatttttttttaattatagaatgtgtttggggtttcgttttgtttgttggagggtgttaattttagtttgtttttcggcgtattttgatttagttttgggagagttaattttattggttttaggtgtttagtgttatttggtttattgtttgtttgtttgtgatttttaagttagaaattggagatggtaagattcgataatttttttaatttaatatatcgcggttttttttattagtaatttttaggtatgtgataaagttgggatgtttattaacggttcgttttttggttagggaaagagttttggggcggagaatgtattttttgttttttgaaaataattttattttgtgtttttaaaagttattggggatgacggatttaggattgtgggtggaggtagtgggttttttattttttgattatggggttaatttttgttagttattgttttttttaataaagattgtgtgttttttttaaaaattttttttgcgtttaga

SEQ ID NO: 510 - DNA, 5986 bp, Artificial Sequence
  chemically treated genomic DNA (Homo sapiens)
tttaagcgtaggggaaatttttaaaaagaatatataatttttattagaaaaaataatggttggtagaagttggttttatagttaggggatgaaaaatttattatttttatttataattttggattcgttatttttagtggtttttaagggtataaaatgaggttgtttttaaaaaatagaaagtgtatttttcgttttagagttttttttttagttaggaggcggatcgttgataaatattttaattttgttatatatttaggagttgttagtgagagggatcgcgatgtattaagttagggaaattatcggattttattatttttagtttttgatttaaaagttataaatagataagtagtgggttaggtagtattgaatatttaagattaataaagttagtttttttaaagttaaattagaatacgtcgaaaagtaagttaaggttaatattttttagtaggtaaagcggggttttaaatatattttatggttgggaaagggttattatcgtcggttgtaggtcgtttttttatttttgcgtattgtttcgttaatttcgtttggttgttcgacggattagtttttgggtttattaaatgcgtgtttttagagttagtcggagttttaattaaaggcgtcgtcgggcggttttcgttgatattttggtttttttgcgtcggtattttgtaggtatttttggggggtcgcgggggtttgtagtagaattcgggtaagttgtttttttttattttttgttattcgtatttgttttttaggggtttgtgattttgaaaatcgaaattttatttgcgttggttcgttttttttatgtttttgtagtgtttttttaagtttcgggttaatttttcgtggtttatcgggtcgaagaggtttttgtaggtcgagggtttggggtgtttcgtttgtttggcgtttattcgttttaggttagggttttcgttagatattcgtacgtttgatatttttttttcgggtttgtacgatcgtttttttcgtatttttaaaaaaataaaatcgaataaaataaagcgtttttacgtagttcgaatttttttcggaagtttagcgattgttttcggagttaaaagatatagatttcgacgagttacggttcgagttttaggagcgcgtaggggttgcggggaagtttcggttcggtcgtcgagttttcgttgattaaatggattggcgagcgggagggcggagaggagaggggattaggtaagcggagagggtggtaaagttcgttcgagtttgggcgggtgtaagttcgcgggtttcgcgaatttagtcgttttttaaattttgtcggcgtcggagtcgtagagtcgtgagtaagcggggataggggagggggagaaaaatatttcgaaaagacgagttttttttttttagtggtttaatatggcggtggaagggaggttgacgaagaagaaaatgattgatacggcgagtttatttaaatagaggaggagatttattggttgcggcggcgggagtcgtttcgtcgaggttggcgagcgcggttttaaggtggtttcggcgcggtttcgttattttttttcgttttcgagcgcgtcgttttttcgagcgtcgtcgggagattggttggtcgcgtgattgttggaggggtattgttgttaataaatttgttttggttggtttcggagaaattaaaattaagataaataaattagttaaacggtcgggaatttggggcggggtttgaggttcggggttcggcgttgcgttggcgggttcgtcgcggcgtttaagtttcgatttttttttcgtttttcgttcgggaagtcgggatttggattagaggatcgcgaaggtcgtcggtagttcgttaggagtcggggtggcgagttgtttttagttcggttttttttagcggtttttatttcgtggtttgcgggggaggtcgcggagcgtttgttgggggggttgggcgttttttcgtcggcgtgtttttgttgggggttggtggaggtagtgggtaatggttcgtttagttttaatttagaagtttttgttatttttggggaggttgggggtttagggaagaagttaaagcgaacgttttttttttagaaattagttaggagtagacgcggtatttattatgaatttaagtttttttttaatgaaaataagaaaggaatttaagattaaaaaaaaaaaataaaaaattttagttttttaagttttttaataaattttgtagttgttttagatacgtttagttttgaaaaacgagggtatatttttggtttaggatttttttttttaagtatagttaaggttatggatattggttgcgtgtgggaattcgtttttttttatttttttgttttttttcgggattgtagtagttttttttatttgagtttagtcgttaaatataatagtttttttttttttttattttttttttttattagattttattgttttaataaatttagaataatatttagatgttagtgaatgtttttagagggttgaagggtgaaaatatttttttcggggttaaattttagatgatgaaatgatttttaaaatattataattatgttttaacgttcgatattagtattttagcgtttttttttttttttttgtagttggaaattttttttttagtgtgggtttgagtatcgtggtggaaggtaaagtaggacgatgagtagggttgttttgagataaagtttagtggatttttaattgtttttttatttttatgttcggtatttattattttggtttgagttaaagttaatgtattttattggaaattaatttttcgttttaatattatatagtagtaaagtttttttaagtatttatgttatagatgagtttgatgtgtagtttgtttttttagttatattttgtttattttgtgtgtttattttattttatacgttttagaatgtgatagttggaagggattttcgggattttgtggtttaatttttttttttttattacggaggaaatcgagatttagagaggttttttgtttagggatatgtattcggttggtatcggagttaggattagatgtaagttttttaatatttaggttggtttattttttgttttttttttttttaatggtttttattggtttagggttttgtttgagtttgattgtgttgtagtttgtaggttttgttgttttataagtgattgaaaatggtttttttttaggttttgggttgtttgtagatgtttttttgatgtggtttgtggttattgatatttaaatgtagttgttttgagtttgtggtattattatttattagtttaattaaaattgaaggataggggttgatatttagagaatagtaaagggggtagtgtttagaattagtttttaagttaggattttttatttaattgatagaaaagaatttatttaggattaagtaagaggttttattttttttagtttttttatttttaaggttgttaatttattggattgtagattgggggaaaaggaataggaaaattagggtaggtttttttattataatttatattttattttagaaattagataattgtttaaattttaaaataattgttagataatataggaattttatatatgtgtatttatttatatgtataaatatttaaattattatatgtatgtaaatggagatattttagagtagtttattttgttatagaagtttgattttatttatggaatttatgttttatatggaagtggaaaataaatatttcgattttttttatatgttgaattttttaattaatatgtaggagtattattttgtcgttttgttgttgttgatttcgaaaagtaagtaagttatagttatattattttaagaagtttggttgttagtagaaaggttgtgtttatatcgattttataatgatttaaagtgttttgtttatagttaaggtatcggagatttgtatagtaaataatgagaacgtaggcgtttgttgtagtagcgacgacgcgtgaaaaaaaatattatggagtttttgaaggaatagggagcgtagagattagagcgttatttttttgtaaagtgggtagttgtaagcgagtaagttagggggaaaatttttagataaatagtgttaaaggtggattttggtaaaagacggaaagttttatattgtattgttttaaagtgagttgtttttttaaaatttttagttttgcgtgatgttttggttgttatttttattgttgtttttttatttagggttgagaagcgttttataagttattttagatttttgtaatttttataatttgaggagagaggtaaagattaaaataatttaagagaaaatatttgtgttatagataagtgtttagatggggtgaatgagtaagtcgttagcgtcgttagtttttagatgtagcgtttttatttaagttttgtagttttaaatgtttttgcgaaggtttacggttttttgtttagttgttttttttatcgtaagtatatagttttagttttttttcgaggatgtttataatgaggtagtatttaattttattatttttttaagtttatatatttttagattttgggaattttatagttatttttttttgatatttttaatttaattttataaatatttacggagtattttttattaatttgtttatttttttttttttttaataaatatttattgagtgttttttttatgttagatattatttttaggttttgggaatatagaagtaaataaatagatttaaattagaatgatgttgatattttaaaaaggggagaggagatagaaaatgaatatagtatatgaaagaagtatatattatgtaaggaggtgaaaaatgttatggagaaataataagcggagagggaaaaggaagtgttttaaggattataatgtgaataagtggttagggaaggttttatggagaaagtggtttttgaggttaggtgtagtggtttatatttgtaattttagtattttgggaggtagaggtaggtggattatttgatgttaggagtttaagattagtttggttaatatgatgaaatttatttttattataaatataaatattagttgggtatggtagtgtaggtttgtaattttagttatttaggaggttgaggtaggataatgatttgaatataggaggcggaggttgtagtgagttaagattttgttattgtatattagtttggaagatagagtgagattttattttatatatataaaaaaggtggtttttgagagaagttttgaagatatgagagagtagttatatagttatttggggaaagagtaaatgaagtgtttttgaggtgggattttgtttaatgtgtttaaggaatagtaggggggtttatggtggatagggcggagtaagtggggagtggtaataggagtattagggttgggtacggtgtttacgtttataattttagtattttggaaggttaaggtgggtggattatttgaggttaggagtttaagattagtttggttaatatggtgaaattttgtttttattaataatataaaaattagttggatatggtggtatacgtttgtgattttagttagtcggaaggttgaggtaggagaattgtttgaatttgggaggcggaggttatagtgagttaagatcgtgttattgtattttagttcgggagagatagagtgagattttgttttaaaaaaaaaaaaaaaaaaaaaaagcgtattagattagataggattaggtaggtataggtagggtttttattattggtttggcgatatggaaagttattggggtattaggaggttttaagtagtgattaatattatgtgtaaggtattgtttaaggtattatttttagtaatgtgggaagtgaagaaatatttgttagagtttttgtttgtggggagtatatattatgtgtataaaaattag

SEQ ID NO: 511 - DNA, 21354 bp, Artificial Sequence
  chemically treated genomic DNA (Homo sapiens)
ttcgggtttacgttatttttttgttttagtttttcgagtagcggggattataggcgtttgttattatgttcggttaattttttgtatttttagtagagatgggtttttattatgttagttaggatagttttgatttttttatatcgtgatttatttatttcggtttttaaaagtgttgggattataggtatgagttattgcgttcggtttattatagtttttttaatggtttttttttgtttttttatttattgttgttttgttattttagtatttagtaattttttttggaatgtttttgatagggttttgttttgttgtttaggttgaggtgtagtggtataattaaggtttattgtagtttcgattttttgggtttagatgattttttaattttagttttttgagtagttgggatttgaatatttgggtttaagtgatttatttattttggttttttaaagtgttgggattataggtatgagttaatatgtttagtttggaaagtttattttatgtttgttttaattgtgttaaggaaaaataaaggaaagtattttttataaaaattttattatgataaattttaaatatatataaaagtattatagaatataattaattttattttcgtattatgttatttggttttaataattattaattttatatggttatttttgttttatttttatttaatttatattttatttttttttggagtatttagaagtaaaatgagagatatttggttttttttttttttttttttttgagatggtgttttattttgttttttaggttggagggtagtggtataattttggtttattgtaattttcgttttttaggtttaagttatttttttgttttagttttttaagtagttgggattataggtgagcgttattatgtttagttaattttggtatttttagtagagatagggttttattatgttggttagattggttttgaattttttattttaagtgatttgtttattttagttttgtaaagtgttgggattataggtgtgaattattgtgttcggattttatttttttttaaaaagagagtttatttaaggaaaatagagagtagagagtttatttttataatgtttttatattgattgggtgtcgtggtttatttttgtaattttagtattttgggaggttaaggtgggcgggttgcgaggttaggagtttaagattagtttggttaatatgttgaaatttggtttttattaaaaaatataaaaattagttaggtgttgtggtatgcgtttgtagttttagttatttaggaggttgaggtaggaagaattatttgaattagggaggcggaggttgtagtgagtcgagattacgttattgtattttagtttgagtaatagagtgagattttgtttcgaaaaaaagaatgtttttattttttttaaaatagagatggggttttgtaatgttgtttaggttggtttttaatttttggttttaaaggatttatttgttttatttttttaaaatgttgggattataggtgtgagttattgtatttggttaagagtagatagtttatatagatagatagtatattttgaaaagatgaggtaaagagggttgaggtaaagagggttgttgaaaagggagtgagttagtagttaatgtttaattattatttttttttggtttttttttatttttatttatttatatttaaaaattatatattaagtatgtatcggttgggcgtggtggtttatatttgtaattcgagtattttgggaggttaaggcgggtagattatgaggttaggagttcgagattagtttggttaatatggtgaaattttatttttattaaaaatataaaaattagttaggtatggtggcgcgtgtttgtaattttaattatttaggaggttgaagtaggagaattatttgaatttagaaggtagaggttgtagtgagtcgagattgtattattatattttagtttgggtagtagaatgagattttattttaaaaaaaaaaaaaagtatgtattatgtgttaggtattgggaatagaaaaaataatatatagtaggttgtttttaagatgtttagattgggatgagaaaaatatttatgaataattataatagaatgtgataaaaattaatttaggttgtgtttatagtgtatatatagtaattagagagtatggttagttttggttttgtttttagaatatgtgtttggagttattagagatgtgatttttaaatgttttatgttgattattagtttattaaaggaaaaattatggagaggtgaaggacgttttgtatttagagggtagagagcgggttgttgtggtttatatttgtaattttagttattttggaggttgaggtaggaggattatttgagtttaggaatttgagacgagagttagtaatagagagatatgtttttaaaaataaaataaaatttaaaaagtttaatttagttaaagtatgggtagaagttagattaagaaggttgagtagttgggtgggtggtttacgtttgtaattttaatattttgggaggttaagttgggaggattatttgagtttagtagttttagattagtttgggtaatatagtgagattttatttttataaaaaatttaaaaattaaaaaattattattaggattataggcggtggtttacgtttgtaattttagtattttgggaggttgaggtaggaggattatgaggttaggagtttaagattagtttggcgaatatggtgaaattttgtttttattaaaaatataaaaattagttgggtatggtggtgtatgtttgtaattaattttatttatttggtaggttgaggtaggagaattgtttgaatttggatttgggaggtagaggttgtagtgagttgagattacgttattgtatttttttagtttgggttatagagttagagttcgtattagaataaaaaaaaaaaaaaagggttgggtaaggagtaggtgattatgaagtggtaaatttgatagtgaaaagtagttagaaaataaagtggagatttttttttttatttttatttatttattgagggtgtatgtttagggttttagggtatagaggtagaggtttagggaatgattgaataataataatggaagatttatatgatgtttattatgtgttaggtattattttaagtattttgtatatattaatttgttttatatatagttgggcggggtggtttatattttggttgagggggaggattgtttgagtttaaaagtttgagacgagtttgggtaatatggtgagatttcgtttttattaaaaattaaaggtcgggcgcggtggtttacgtttgtaattttagtattttgggaggtcgaggcgggcggattacgaggttaggagatcgagattatttcggttaaaacggtgaaatttcgtttttattaaaaatataaaaaattagtcgggcgtagtggcgggcgtttgtagttttagttatttgggaggttgaggtaggagaatggcgtgaattcgggaggcggagtttgtagtgagtcgagatttcgttattgtattttagtttgggcgatagagcgagatttcgttttaaaaaaaaaaaaaaaaaaaaaaaaattaaaaaaattagttgggtatggtagcgcgagtttgtagttttaattattcggaaggttgaggtgggaggattttttgagatggggaaattaaggttgtagtgagttatgatagttttattgtattttagtttgggtgatagaaggagaatttgttttaaaaataaataaaataaaataaataggttgggtacggtggtttacgtttgtaattttagtattttgggaagttgaggtaggtagattatttgaggttaggagtttgagattagtttggttaatatggtgaaatttcgtttttattaaaaatataaaaattagtagggtatggcggcggatagttgtaattttagttattcgggaggttgaggtaggagaatcgtttgaattcgggaggcggaggttgtagtgagtcgagatcgcgtttttgtattttaatttggtgatagagcgagatttcgtcgaaagaaggaaaggaaagggaaagggaaaggaaagggaaagggaaaggaaaggaagagagagagagagagaaagaaaagaaaagaaaaaagaaaagaaagaaagaaagaaagaaagaaagaaagaaagaaagaaagaaagaaaataaataaaaataaatagggattaataaataggtagaagtaggtataattcggggtaggggaagtttcggggttacgttcgagaggtatttgtattttatttttagtagtttagagtttatgatagttaggttatttatttgtggatttttttgattatttaattgagttaatttaatttttattttttttttttttttattttatttagcgggttacgtagttattagggtttttttagtttattaggttatttggggattgagttatttagttagttatttatttggtggttatatttgtttttgggtttatttttttattgggttatttcggtttatcgggatttgttagtttttgattttttttaggtttttaggttggttaggtcgttttagtgttacgtttttttggttcgcgatttagtttgtacgttacgttttgtttttagaagtaggttttcgaaacgcggttttttttcggttttagttgtttttttgttagcgttgggagattcggtagtcgtagcgtttttagcggcgcgtagcggtttaggaagagagtgtttatcgtcggcgtttttttagtttttttttggaacgcgggagcgggcgcgattagcgtttattttgatcgtcgcgacggtgtttttgattggttgcgttgtgtgacgtaacgggagggtttcggcggtcgtcgggagtcggggtttagcgcgtgcgtagacggagcgcgttgagcggagggggaggtggttgtcgtttttttcgcgttcgttattttgttgttgtggttattgggaataagttgggtaaaagtatttcggaggcgcgacgttttttcgagttcggtgtttcgtgtgacggcgggggtcggtgaagattcgtcgagttgcggcgtcggcgcgttttaggtcgggagttattggaggtatttttgggacgtcgagtagttcgagaatttcggggtggttttcgttgcggttcgggtttgtttgtttcgatttttcggttttgtcgtgtattttcgggcggtttttttcgtgtggcggtttcggagtaggcgggcggcgtcggaggatgttgcgggttcggagtcgagaggaaagtgttggtttagttttttgagcgtttttcgaggtgtgcgagaggttttttttcggttttaaagtcgtttgtcgggttaaggcgtgtagagtaggcgaggatagtcgtcgtttttatcgtcgtagagttttcggtttaatattatgtttttcgttaggttcgatttttcggatcgtttcgtttggtatatggggtcggtgtttcgttaggaggcgtagattcggttttagggttagcgttacggtatgtttttcgttcgcgatttttttatttgttttggggattatgtgttgtcggtgttcgagaattcgcgggttttttattatattattaattcgttgtttaatcgtcgttttaagatcggggattaggaatttgattatttgtcggttttgttggagttttataagatttattatttggatattattatttttatcgagtttgcgtttaggtacgcgagagtttttttcgatcgcggaggaaggtcgagaatcgggtttgtcgaagagtgtttgtataggggggtggggcgcgtttgaatttatatttttcgtattttgaattaaattattttttagaaggtttttttaatagaaagttagtgttaggatttgggttattggataagaggatgcgtttttttttttttttttttacgaggttgttttttaatgtgaagaggatgcgttttgaatgtttaacggtggttgtatagttaaaatgtacgttttttgtttttcgtgattttttttgggtgtaatattgatgtagggatttgttggtttttttaaaaattttttttttttttttttttttgagacggagtttcgttgtgtcgttaggttggagtgtagtggtgcgatttcggtttattgtaattttcgtttttcgggtttaagcgatttttttgttttagtttttcgagtagttgggattattggtttacgttattatatttagttaatttttgtatttttagtagagacggtgttttattatgttggtttggatggtttcgattttttgttttcgtgattcgtttgtttcggttttttaaaatgttgggattataggcgtgagttattatattcggttaaaaatcgtttttaagttatagatttttttgagaatttgaagatagtcgagtatttattattttatttttatttttatttttattttttttcgttaaaggtacgtatatataagtttgtatattatttcgggtgtttgtattttttttagatttttgaattttaggttaagaattttaggattgtagtttttggaatagttaaaaaaatgaaaatgttttagcgtttagaaataaaaaaatttttaattaaaatattagaattgtatattgatattgtggtgttaagtttgaagtaggttagatattattatttttatagtacgttaattataaagataagagaaggtgtattggttttagcgaggatattttttggaaaatttattgtatatttttttttcgaggattattagtaggttagagattagtttggttaatttttaaggtggaattaggttagaatgttattaaggaaaatttttgaatgatatttagttgtattttagtttaattttagatatgttttttgtgttaagtttaatgattttgtattttttattttaaaattaacgtaaagtgattaagtatttttttttttaagtgaaatacgttattttaattgattagttgttttaatttgttttaagcgttttagtagagatttgtttttattgttgtgtttgttttgtaatattgattttattagaggttttttttatttaaattattttaaatttgagttgaaaagttgtttagaatttttaaagtaataaattggttagttcgttttttaaatatttattttaaaaggattgggtgttgatatagtttttttagggttagatgtttatgattttatggatttgtcgatcgggtattattttaaattttaaatattaaaagttattataattgaggatattaattgtttgtatagtgggatagagatagaaaaaaaaaagttatgatagtataatgattataagattaattattgaattaaatggattttaaaagtggggagaaagtgattataaattaaatattgtataataaagattaggatattaagaatttgattggtgaaatttgcggtttttggtagatgttggtagttgtagttaattttgagtataatataattttaatttaaggagttgagaattttagaatttattgtagtgagatttgtaatatgattgaataaattttttttttcgtttgtgagcgtgaattatataattaatattaggtatttattaagttatgtatatgtttatgttgaggttatgagtattaataatatagttgttttaaaaagtaagttaatgggcgggtgtggtagtttacgttagtaattttagtattttgggaagttaagtcgggcgaattacgaggttaggagtttaagattattttggttaatatggtgaaatttcgtttttgttaaaaatataaaaaattagttgggcgtagtggtgggtgtttgtaattttagttattcgggaggttgaggtaggagaatcgttcgaattcgggaggcggaggttgtagtgagtcgagatcgcgttattgtatagttcgggtgatagagtgagattttgttttaaaaaaaaaaaaggaaaaagttaatgatttgagtttttttttagaggaaggaaaagaagtatgtcgtttttttttatttatagaatcgtttttagatttttcgtatatgtatgtatttttttagagaataagtatgtaattttgtttttgttttttttcgttttttttttattgtagttgtattaggttgtttatttattttttggtagttatttttttttatttatatttttgtatttttgtatttttgttttagttgttggttttttattgattgttttaattatattttattttttatttgttgaaattttatttgttgttttagtttttttatagattatagggtttttttttgattttattttttacgtttagttttgtttttttttttttgtgttttttgttttaggtttgttgttttaatttagttttttatttttttaggtatttttgaaggagattattatgttggttgaattagattttgattgagtttattttgttatattgaattttcgaattgttatttttaagtttggtttttatggtttaggtttaatatgttattagttttttatagaaagttagtgattattagagtttgggttaaacggaaaatttagtgtaatgttttttcgtattttaaatagggtatatttagtggtttaattttgtaggtattaaaattgagtttttaaagttagagttttatgttttttggttaatattttggtttattttgtatagttaaaatttgtaataataatgttttattcgaaatttaaggattggtggtttgtattgttatagttttattttttttattagaatgttttataatttttaattttatatttttatttaaatgtttataagagaattataatttagtgtaatttagtgtaggtattgggaaagatgtgtgatagatatattttttttttgtggaatttttattgtagtggagaagatagattgaaaagtagaaaaataaagtattagtaagattaatatataggagggatttatttggggtggcgtggttagagaaagtatgaagttaagatttgagggtaaagaagaatttagtttaggtaaggtttggtttgagaggaggagaagagttttttaagtttagggaaaagtttatgtagatgttttgaggtgagaaagtttattgtgttgggagtgtgttttttttttttttttttttttttttttttttttttttgagacggagttttgttttgtcgtttaggttggagtgtgcgatttcggtttattgtaagtttcgttttttgggtttatattatttttttgttttagtttttcgagtagttgggattataggcgtttgtaattatgtcgggtaaattttttgtatttttagtggagacggggttttattatgttagttaggatagtttcgattttttaatttagtgattcgttcgtttcggttttttaaagtgttggaattataagtgtgagttattgcgttcggttttttttttttttttttttttttggtagatgacgttttattttgtggttaggttagagtgtagtggtttaatttcggtttattgtaatttttgttttttaggtttaagtgatttttttattttagttttttgagtagttgggattgtatgggattataggtattcgttattatgttcggttaatttttgtatttttagtagagataaggttttattatgttggttaggatggtttttatattttgattttatgatttatttgttttagttttttaaagtgttgggattatagatgtgagttatttttttcggtttgggagtgtgttttttaaaggagaaagggggatatataaaatgagtttggagataaagattagggttaggaattgggtttttatttaaagtgttgtgggttttaaggaaggaatttgaggtagaggagtgatttggggttgttattgtaatttagttataaaatgatggtgattaatagtgatagtggagttgtgatttggagatgtttattttggagataaaattgatttgttggtgggtggggatgaagggaaagggaagaagggatgatttggtttatttgtaattttgttattttttgtgtttttatttttaattgttttttgtatttgtggtatttttatggtggattttattttatttatttttttgagattaagtttttttttgttttttaggttgtagtgaagtggtataatttgggtttattgttattttcgtttttggggtttaagatttttttgttttagtttttttagtagttgggattataggtatgtattgttatatttggttaatttttgtatttttggtagagatagggttttattatgttggttaggttggttttgaatttttgattttaagtgatttatttgtttgggttttttaaagtgttgggattataggtgtgagttattgcgtttggtttagttttagtgtatttttatttaataagggttgtttttagtttaataatagaatgttttagaaggtagtttgttttgtttgatattttttatttttagtttgtgtcgatagataaatttaggttatgaagaaaaattagaataaataaaattttattattaaaaattaaaggaagttggttttttaagaaaataatgtattgtatttagtagattttgagtattatatgtatttggtaatatggaattaatattgaattagatagttttattatgtttttgaggagtttattggttattaaaaaaaaaatttttttttttttgagacggagttttgttttgtcgtttaggttggagtgtagtggcgggattttggtttattgtaagtttcgttttttgggtttacgttatttttttgttttagttttttgagttagttgggattataggtgttcgttattatgttcgggtaattttttgtatttttagtagagacggggttttatcgtgttagttaggatggtttcgattttttgatttcgtgaatcgttcgtttgggttttttaaagtgttgggattatagttatgagttatcgcgtttggtatttttttttttttttttgagatagagttttgttttgttgttaggttggagtgtggtggtgtaattttggtttattgtaatttttattttttaggtttaagtgatttttttgttttagttttttaagtagttgggattataggcgtacgcgttattatatttggttaatttgtgtatttttagtagagatggggttttattatgttgagtaggatggttttttgttttttgattttaggggatttgttcgtttcggttttttaaagtgttgggattataggcgtaagttatcgcgtttggttattaaaaaaaaaaaaaatgtaaaggttggttgtgttcggtggttcgtgtttgtaattttagtatttcgggaggttaaggtaggaggatcgttagattttaggagtttgagattagttttggtaagatagtgagattttatttttataaaaaattaaaaaattagttgagtatggtgttatgcgtttttaagttttagttatttgggaggttgaagtggaaagattgtttgagtatgggaggtcgaggttatagtgagttatgattatgttattgtattttagtttgggtaatagagttagattttgttttaaaaaatgaatgaatgaatgaatgtaagttgtatatatttaatatatttaatttttatgtatggtgaaatagttgtgggagaattgagaaagggtgtttagtttaatttgagagtttagaagaggagttttatatatttgtgaagtagaagttaatttttgaagggataggaggaaataagaagtatggttgtgttttttttttatattttttgttttaattatttaagaatttaaatttagatttttataatttggaatggggaaaggattgttagtaattttaattagtatagaatttaattttgtgaataaatttttttgcgttttttttgattagtagttaaaattatgtgaatttgatttagagaaaaatataagaatatggttaggtgtagtggtttacgtttgtaattttagtattttgggaggttaaggtgggtggattgtttgagtgtaggagtttgagattagtttgggtaatacggtgaaattttgtttttattaaaatataaaaaattagttgggtatggcggcgtgtgtttaagaggttaaaggtaggagaattatttgaatttggggggtggaagttaaagtgagtcgaggtcgtgtagttggattttattttgggcgatagagtgagattttttttaaaaaaataaaaaataagaatattgttatgttgagaatggaattttgtttaattaagagttgtgtttttagtcggatgtggtggtttacgtttgtaattttagtattgtgggaggtttaggcgggcggattatgaggttaggagattaagattattttggttaatatagtgaaatttcgtttttattaaaaatataaaaattagttgggcgtggtggtatgtatttgtagttttagttatttcggaggttgagataggagaatcgtttgaatttgggaggtagaggttgtattgagttaagattatattattgtattttagtttgttaatagagcgagatttcgttttaaaaaaaaaaaaaaaaaaagagttgtgtttttatggaaagtattagtagttattcgatttgtgatttttaaaatttaaatttatagaattgtgatttaaatttttttttttgatttgaatgattagattagatttttgagggtttttaagattaaaatattttaattttgggtcgggcgtggtggtttacgattgtaattttagtattttgggaggtttggtaggtcgggagttcgagattgaatttgggaggtagagatgatagtgagtcgagattgcgttagcgttattgtattttagtttggttaatagagcgagatttcgtttcggaaaataaaaaataaataaataaaaaatattattttaatttttttagataagtaaaagggggtatagtttattagttgggagtttagattaatttgagttgaatttgagttaaaattataataagttgggtggggttattaggtatatagtaatttatttggaatgaacgtgataagaatagtggaagaggatgagaagaggttttgaaggtgtatatttaacggtattcgaattttgttatattagttttgtgatagtattaaattagagttaggtaatttgaatatttgagtttttgtgtttttagaaataaaaaaggagggaaataggaaagggaagttttttgatatatagaggtttataatatattaaagtttattgttagatttttggaatttaatggaagtaaattatgtttttgtttttgatttttgtttttgagaagttttggtttattgaaaaaattagaatgttatgatagtttaaaagtaaaggtaattaattgtatttaagaggtggggagaggtttgaaagaggagatgttttttaattgattttttaaggatgagaataagtatacgaggtagaagaggtggtggtagaagagatggtggtagtgtttgttggtaaagatatagttataattaatgtagatgatgggtaggaatttaggaaggaaagataaagttaatttgtaaagggtttttttagttttgtaaatgagtttaataatgggagttatttaaagtttttaaaaagagaattgttagattttaaaaggagaattgatgagttttatttttgagaaattgttttgggtggggaaagatttgaaggattaattttttgttattggagagggattttgagaagttgagttaagattaaatgttataggaatgtaaagtggtatatagaaggtgaggggagaggtatgatgattttagagaggattgagtggtgtttttgagataagagaaagggattagggtgggtgcgtgattttttttaataggaagaatttttttttgaggtatttgttggaagttaggtggtatttagtaatttgatgggtttgttattgagaagagaggtaagggttgaatatatatagatttgggaatcgtagtttagatgggattatttagaatgaggaggtagaataggaataagtagagaaagagaagttgcggaaggagaggtagttataagtataggaggaggagttattagtgatggtttgaaagtttagggatagaagggaggggatttgggtattaaatgttggttagtgataaagaatggtggttattggttggatatggtggtttacgtttgtaattttagtattttgggaggcggaggtaggtggattgtttgagtttatgcgttcgagattagtttggttaatatagtgaaattttgtttttattaaaatataaaaaattagttaggtatggtggcgtgcgtttatagttttagttattcgggaggttgaggtaggagaatggtttgaatttgggaggtagagattgtagtgagttaagatcgtattattgtattttagtttgggtgatagagtaagatttcgttttaaaaaaaaaaaaaaaaaaaaaaaaagaatggtggttaaagtagttttattagagaagtatttagtttattttggaattgaattttttttttttttttttgagatagtgtcgttttgtcgtttaggttgaagtgtagtggtatgatttcggtttattgtagtttttatttttcgggtttaagtgatttttttgttttagttttttgagtagttgcgattataggcgtttattattatgttcggttaatttttgtatttttagtagagatggggttttattatattggattaggttggttttaaatttttgattttaggtgatttaattgtttcggttttttaatgtgttgggattataggtatgagttagttattacgtttagttggaattaagttttttatttttttttttttttttttaattgtgaaatattttatatatagaaaagagtaagggtgtcgtggtttacgtttgtaattttagtatattgggaagttaagataggtggattatttgaggttaggagttcgagattagtttggttaacgtggtgaaattttgtttttattaaaaagataaaaattagtcgggcgtggtggtagatgtttgtaattttagttatttgggacgttgaggtaggataattgtttgaattcgggaggtggaggttgtaatgagttgagatcgtattattgtattttagtttgggtaatagagtaagattttgttttaaaaaaaaaaaaaaaaaaaaaaaaggaaaaagagtaagtttgggtacgttggtttatgtttgtaattttagtattttgggaggtcgagggaggtagattatttgaggttaggagtttaagattagtttggttagtatgtgaaatttatttttgttaaaaatataaaattagttcggtagtagtggggttttgtaattttagttattggggaggtttaggtataagaatagtttgaatttaggaggtagaggttttggtgagttgagattatattattatattttagtttgggtaatagagtgagattttgttttaaaaaaaaagtatatgtaagttgggtgtggtggtatgtatttgtagttttaaatagtggggaggttgaggtaggaggattgtttgagtttaggagtttaagattagtttgggtaatataaatttttatttttgtaaaaaattaaataaggattggttgggtatggtggtttatgtttgtagttttagttatatgggaggttgaggtgggaggattatttgagtttgggaggttaaggttatagtgagttatgatcgtattgttgtattttagtttgggttatagagtaagacgttattttaaaaaaatttataaaataagttaaaaaaaattattatttgtgtgttttttttaaaaaataaataaataaaatattggttaggcgtggtggtttagattgtaattttaggattttgggaggttgaggtgggaagattgtttgagtttaggagtttaagattagtttagataatatggtaagattttgtttttattaaaaatataaaaattaatcggatgtggtggtatgtatttgtagttttagttatatagaaggttgaggtgggaggatcgtttgagttttggaggttgaggttgtaatgagttatgattgtgtttttgtattttagttcgggtaatagaacgagattttattttaaaaaaaaaaaaaaaaaaaaaaaaaggaatattattagtatttttgaaattttttttttttagaagttgattgtattggtttttagtatgtataaggagattttaagtttagaatatattagtatttggtttaaagatgttttgtgtatggtttatatatgtagaaattgagaacgtttttaattaaaagagttgagagattcgttattattagaaaagaaaagttagttacgaattagttgttaggggttttgttgtttaaagtgtgtagtggataataggtaaaaagtgagaagtatggttaagggtgtttggatgggtttgaaaattttgtgtattttattttattttattttatttatttatttttgagtcggagttttattttgttatttagattggagtgtagtggcgcgatttcggtttattgtaagttttgtttttcgggtttatattatttttttgttttagtttttcgagtagttgggattataggcgtttgttattacgtttagttaatttttttgtatttttagtagagatggggttttattgtgttagttaggatggtttcgattttttgattttttgattcgttcgttttggttttttaaagtgttgggattataggcgtgagttattgtatttgttttatttatttaattttttgagacggaatttttgtttgtcgtttaggttggagtgtagtggtatgattttagtttattgtaattttcgtttttcgggtttaagtaatttttttgttttagttttttaagtagttgggtttataggtatacgttattatatttggttaatttttgtattttaatagtgatagggttttgttatgttggttaggttggttttaaatttttgattttatgatttatttgtttcggttttttaaagtgttaggattgtaggtatgagttattgcgtttgggtaatattttatattttaaagggaagttgggggagggtgttatttttaattttgtttaaagaataaataattgggaagtaataaattttttgatgaatatgttttatatttttttagatagtggggtttaatggaaaggttaagatatttgatatggagtaatatgtatttatttttttagtggaattaatgtgtaatttttaggggagtttgatgaataaatgagtttgagaatatagggtagaggatttggaatttgtgttagggttatggttggtgagattgatttggtgttaaatttatgaatatttttgtagatattaatatagaaaatgagttttaaggttattatagtagtatagtagtggagggaaatagaaattatttttattaaatttttatatagatatattttttattagggaagtaaggaagttgaaaagtatattttgtttttttaatttaggaatttagatgggggattagtaaattgttgagtaaagggttagattttaaatatttttagtttttttatagagtttttgtttaattatttaattatgtttttgtagtgaaaaatagttatagataatacgtaaatgaatgggtttggttatttttttttttttgtttgtttttaagatggagttttgttttgttatttaggttggagtgtagtggtgtgattttagtttattgtaatttttgttttttaggtttaagtaatttttttttttcggttttttaagtagttgggtttataggcgtacgttattatatttggttaatttttgtatttttagtagtgatagggttttttgttatgttggttaggttggttttgaatttttgattttaagtgattttttcgtttcggttttttagtgttgggattataggcgtgagttattatacgtttggttttttttttttttttttttttttttttttgagatagagttttaattgttttaggtagtgacgtgattttggtttattgtaagtttcgtttttcgggtttatattatttttttgttttagtttttcgagtggttgggattataggcgtgtgttattatatttggttaattttttgtatttttagtagagagatagggttttatcgtgttagttaggatggttttaattttttgattttgtgattcgtttattttagttttttaaagtgttgggattataggcgtgagttattatatattggttaattgtttttaattatataaataataaaatatttttggatggagtttaaggtggaattgattgtgtttttaatagtgtttgaaatttatatggtatttattggattgtttataggttttttgtggtttttgaaatagtaggggttgggtgtgatggtttatatttgtaattttaatattttgggaggttaaggcgagagaattgtttgaggttagaagtttaagataagttttgaaaatatagtgagatttttatttttatagaaaatttaaaaattggttgtgtgtgatggtaattgtttgtagttttagttatttaggaggttgaagtgggaggattatttgagtttgggaagtggaggttatagtgagttgtggttgtgttattttgtattttagttaggatgatagtaagattttgttttaaaaaaaagagaaagaaatagaagtagggatatatttgaaggggtatgtgtgtgtttatgtcggtatattggatgtttggtgttgttcggtaattttgaatgttttatatgtattatgttattaatttttatatatttgatagatgtagggttcgtttttaaggttgattagtttattatgagtgaagagtttagaattagattttttgagtgtaagtttaattttttttttggttttttatttgtaaaatggggataataatagtatttattttatagattattaaataatttaatttttttaaagatcgtaaattatgtttagtatagataataagtatgagttttttattattatttttgtttttattatttttgttagttatttatttttatttttattttattttattttatttttttgagacggagtttcgttttgttatttaggttggagtgtagtggtgtaattttggtttattgtaagtttcgtttttcgggtttatatcgtttttttgttttagttttttgagtaagtgggattataggtatttattattatgttcggttaattttttgtatttttagtagagacggggttttatcgtgttagttaggatggtttcgattttttgattttatgattcgtttattttagttttttaaagtgttgggattataggtatgagttattgcgtcggttttttatttatttatgttttgagatagttttgttttgttgtttaggttggagtgtaatgatgtagttatagtttattgtagtttttaatttttgggtttaagtaatgtttttgttttagttttttgagtatttgggatcgtaggtgtgtgttattatgttcggtttattttttgtttgtttagtagagatagggttttgatatgttggataggtaggtttttaagttatttgtttgttttggttttttaaggtgttgggattataggtttgagttattacgtttggtggatttattatttttaatttggtaagtttgtaagtttttttttgtttttttttttttaagaggttagaggtagaggtttttgttattttttgtgtgtttagggaagtgtgtaggatgtaagttatagattaggattgggaggaagagtgtgtggtggttgtgataagggtttaaaggaaggtagttttcgaatttatttgagattataaaaataaatttaaattaggtatttttgtgtaattaaaaggtttttgtaaaatagagatggagtgtatgtgtgtgtgtatatttgtaatttgaaaagatatttagaatagtaatttttgggatagtatagattataaaaattataatatgatagaatttttttaattattaagaatatagaaaggaaaataaagttaggcgtggtggtttatatttgtaatgatagtattttgggaggttgaggcgggtggattatatgaggttagtaggagtttgagattagtttggttaatatgttaaaattttgtttttattaaaaatataaaatttagttgggtatggtgttgtatatttgtaattttagttattcgggaggttgaggtagaaaaattatttgaatacgggaggtagaggttatagtgaattgaaattgcgttattgtattttagtttgggtgatagagtaagattttgtttttaaaaaaaaggttgggtttagtggtttatatttgtaattttagtattttgggaggtcgaggtaggtagattacgaggttaggagattaagattattttggttaataaggtgaaatttcgtttttattaaaaatagaaaaaattagcggggcgtggtggtatgtgtttgtagttttagttatttaggaggttgaggtaggagaattgtttgaatttgggatgtagaggttgtagtgagttgagattttgttattgtattttagtttgggtaatagaataagattttatttttaaaaaaaatgtagaggtcgggtatggtggtttatgtttgtaattttagtacgttgggaggtcgaggtgcgtggatcgttcgaggttaggagtttaagattagtttggttaatatggtgaaattttttttttattaaaaataaaaaaagttatttgggcgtggtagtgggcgtttgtaattttagttatttaggaggttgaggtaggagtattatttgaatttgggaggtagagtttgtagtgagttaagattacgttattgtattttagtttgggcgataagagtaaaatttgttttataaaaaaggaaaataatttattatagaggagagtggtatattaagaagtttgataggtattggtttagagtaagattttttttttagagtaatttttttttttttttaagg

SEQ ID NO: 512 - DNA, 21354 bp, Artificial Sequence
  chemically treated genomic DNA (Homo sapiens)
ttttaagagagaaagaaaattattttaagagaaaaattttattttaagttagtgtttgttaaattttttaatatattatttttttttataataaattattttttttttttatgagataagttttgtttttgtcgtttaggttggagtgtaatagcgtgattttagtttattgtaaattttgttttttaggtttaagtgatgtttttgttttagttttttgagtagttgggattataggcgtttattattacgtttaggtaattttttttatttttagtagagaaggggttttattatgttggttaggttggttttgaatttttgatttcgggcgatttacgtatttcggttttttaacgtgttgggattataagtatgagttattatgttcggtttttatattttttttggagatggagttttgttttgttgtttaggttggagtgtagtggtaggattttagtttattgtaatttttgtattttaagtttaagtaatttttttgttttagttttttgagtagttgggattataggtatatgttattacgtttcgttaattttttttatttttagtagagacggaattttattttgttagttaggatggttttgattttttgatttcgtgatttgtttgtttcggttttttaaagtgttgggattataggtgtgagttattgagtttagttttttttttggagatagaattttgttttgttatttaggttggagtgtagtagcgtaattttagtttattgtaatttttatttttcgtgtttaagtgatttttttgttttagtttttcgagtagttgagattatagatgtgtaatattatatttagttaaattttgtatttttagtagagataggattttggtatgttggttaggttggttttaaatttttgttggttttatgtgatttattcgttttagttttttaaagtgttgttattataggtgtgagttattacgtttggttttatttttttttttatatttttagtagttaagaaggttttattatgttgtaatttttgtagtttgtattgttttaaaagttattattttgaatgtttttttaaattataagtatatatatatatatatattttatttttgttttatagaaattttttgattatatagagatatttggtttaaatttatttttataattttaagtaagttcggaagttgtttttttttggatttttgttataattattatatatttttttttttagttttaatttatggtttatattttgtatatttttttggatatatagaaaatgataaaggtttttgtttttggttttttgaaaaaaaaggaataaaaaagggtttatagatttgttaaattaaaaataataaatttattaggcgtggtggtttagatttgtaattttagtattttgggaggttaaggtaggtagatgatttggagatttgtttgtttaatatattaaaattttgtttttattaaatagataaaaaatgagtcgggtatagtggtatatatttgcggttttagatatttaagaggttgaggtaggagtattatttgagtttaggagttagaagttgtagtgagttatgattgtattattatattttagtttgggtaatagaataagattgttttaaaatataaataaataagaggtcggcgtagtggtttatgtttgtaattttagtattttgggaggttgaggtgggcggattatgaggttaggagatcgagattattttggttaatacggtgaaatttcgtttttattaaaaatataaaaaattagtcgggtatggtggtgggtgtttgtagttttatttatttaggaggttgaggtaggagaacggtgtgagttcgggaggcggagtttgtagtgagttaagattgtattattgtattttagtttgggtgatagagcgagatttcgttttaaaaaaataaaataaaataaaataaaaataaaaataaatagttagtaagagtagtaggagtaagagtaataataaagagtttatatttattatttatgttaggtatggtttacgatttttgaagagattggattatttaatagtttgtgaggtagatgttgttattatttttattttataaatgaggagttaaagaagaggttagatttgtatttagggagtttggttttaaattttttatttataatgagttaattagttttagggacgaattttgtatttgttaggtgtatgagaattaatggtataatgtatgtgaggtatttaaaattatcgagtagtattaagtatttaatgtatcgatatgaatatatatatatttttttaagtatatttttgtttttattttttttttttttttttgagatagggttttgttgttattttggttggagtgtagagtggtataattatagtttattgtagtttttattttttaagtttaagtgatttttttattttagttttttgagtagttgggattataggtagttgttattatatatagttaatttttaaattttttgtagagatgggggttttattatgtttttagggtttgttttgaatttttagttttaagtaattttttcgttttggttttttaaagtgttgggattataggtgtgagttattatatttagtttttgttattttaagagttatagagagtttgtgaatagtttagtaagtattatataaattttagatattattaagagtatagttagttttattttagattttatttaagagtattttattatttgtatagttaaaagtagttagttagtgtgtggtggtttacgtttgtaattttagtattttgggaggttgaggtggacggattataaggttaggagattgagattattttggttaatacggtgaaattttgtttttttattaaaaatataaaaaattagttaggtgtggtggtatacgtttgtagttttagttattcgggaggttgaggtaggagaatggtgtaaattcgggaggcggagtttgtagtgagttaagattacgttattgtttgaaatagttaagattttattttaaaaaaaaaaaaaaaaaaaaaaaaaaaaagttaggcgtgtggtggtttacgtttgtaattttaatattgggaggtcgaggcgggaggattatttgaggttaggagtttaagattaatttggttaatatgataaaaaattttgttattattaaaaatataaaagttagttaggtgtggtggcgtgcgtttgtaggtttagttatttgggaggtcgagggaagagaattgtttgaatttgggaggtagaggttgtaatgagttgagattatattattgtattttagtttgggtgatagagtaagattttattttaaaaataaataaaaaaaagaagatagttaagtttatttatttacgtattgtttatgattgttttttattataaaggtatagttgagtagttggatagagattttatggaaaagttgaaaatatttaaaatttgattttttatttaatagtttgttgattttttatttaaatttttgggttagggaggtaaagtgtgttttttaatttttttgtttttttggtgaggggtatgtttgtgtagaaatttgataaagatagtttttatttttttttattattatattgttatagtgattttggggtttattttttgtgttagtatttgtagagatatttataaatttgatattaaattaattttattagttataattttgatataaattttaagttttttgttttatatttttaaatttatttatttattaaatttttttgaaaattatatattagttttattgaagagataaatatatgttgttttatgttagatattttagtttttttattagattttattgtttaaagaaatatgaagtatatttattagaaaatttattgttttttaattatttgttttttgagtaaggttgaaaatagtatttttttttaatttttttttaaaatataaagtgttgtttaggcgtagtggtttatgtttgtaattttagtattttggaaggtcgaggtaggtggattatgaggttaggagtttgagattaatttggttaatatgataaaattttgttattattaaaatataaaaattagttaggtgtggtggcgtgtgtttgtaggtttagttatttgggaggttgaggtaagagaattgtttgaattcgggaggcggaggttgtagtgagttgagattatgttattgtattttagtttgggcgatagatagagatttcgttttaaaaaattaaatagataaggtaggtgtagtggtttacgtttgtaattttagtattttgggaggttaaggcgggcggattaagaggttaggagatcgagattattttggttaatatagtgaaattttatttttattaaaaatataaaaaaattagttgagcgtggtggtaggcgtttgtagttttagttattcgggaggttgaggtaggagaatggtgtgaattcgggaggtagagtttgtagtgagtcgagatcgcgttattgtattttagtttgggtaatagagtgagatttcgatttaaaaataaataaataaaataaaataaaataaaatgtatagggtttttaagtttatttaaatatttttgattatgttttttattttttgtttattgtttattatatattttgagtagtaaagtttttaataattaattcgtaattgattttttttttttgatgataacgaattttttagtttttttggttaaaagcgtttttagtttttatatgtataaattatatataaaatatttttaaattaagtgttaatatgttttaagtttaaaatttttttatgtatgttaagaattaatataattaatttttagaaaaaggaagttttaaaggtgttggtaatatttttttttttttttttttttttttttttgagatgggatttcgttttgttgttcgagttagagtgtagaggtataattatggtttattgtagttttaatttttaaggtttaagcgatttttttattttagttttttgtgtagttgggattataggtgtatgttattatattcgattaatttttgtatttttggtagaaatagggttttgttatgttgtttaagttggttttgaatttttgagtttaagtaatttttttattttagttttttaaagttttgggattatagtttgggttattacgtttggttaatgttttatttatttattttttaaagggagtatatagatgatagttttttttggtttgttttgtaaatttttttgagatagcgttttgttttatggtttaggttggagtgtagtagtacgattatggtttattatagttttgattttttaggtttaagtgatttttttattttagttttttatgtagttgggattataggtatgagttattatgtttagttaatttttgtttaattttttgtagagatgggggtttatgttgtttaggttggttttgaatttttgggtttaagtaatttttttattttagtttttttattatttgggattataggtgtatgttattatatttagtttatatatattttttttttgagatagagttttattttattgtttaggttggagtgtagtggtgtgattttagtttattaaaatttttgttttttgggtttaagttatttttgtgtttaagtttttttagtagttgggattatagggttttattattgtcgggttaattttgtatttttaatagagatgggttttatatgttggttaggttggttttaaatttttgattttaagtgatttgtttttttcggttttttaaagtgttgggattatagatatgagttaacgtgtttaggtttattttttttttttttttttttttttttttttttttgagatagagttttgttttgttatttagattggagtgtaatggtgcgattttaatttattgtaatttttatttttcgggtttaaataattattttgttttagcgttttaagtagttgggattataggtatttattattacgttcggttaatttttgtttttttagtagagatagggttttattacgttggttaggttggtttcgaatttttgattttaagtgatttatttgttttggttttttaatgtgttgagattataggcgtgagttacggtatttttatttttttttatgtatgaaatattttatagttaaaaaaaaaaaaaaaaaggtagaaaatttaattttagttgggcgtggtgattggtttatgtttgtaattttagtatattagggggtcgaggtaattggattatttgaggttaggagtttgagattagtttggtttaatatggtgaaattttatttttattaaaaatataaaaattagtcgggtatggtggtgggcgtttgtaatcgtagttatttaggagattgaggtaggagaattatttgaattcgggaggtggagattgtagtgaatcgagattatgttattgtattttagtttgggcgatagagcgatattgttttaaaaaaaaaaaaaaaaaatttaattttaagatgagttaagtatttttttagtgaaattgttttaattattattttttttttttttttttttttttttttgagacggagttttgttttgttatttaagttggagtgtagtggtgcgattttggtttattgtaatttttgttttttaggtttaagttatttttttgttttagtttttcgagtagttgggattataggcgtacgttattatgtttggttaattttttatattttagtagagatagggttttattgtgttggttaggttggtttcgaacgtatgagtttaggtaatttatttgttttcgttttttaaggtgttaggattataggcgtgagttattatgtttagttagtaattattattttttattattgattagtatttaatgtttaggtttttttttttttgtttttgggtttttaggttattattaatggtttttttttttatgtttgtggttgttttttttttcgtagtttttttttttttatttatttttgttttgtttttttattttgggtgattttatttaagttgcgatttttaaatttatatgtatttagtttttatttttttttttaataataaatttattagattgttaaatattatttggtttttagtaggtattttaaagaaagattttttttgttgaaaagaattacgtatttattttaattttttttttttgttttaaaggtattatttaattttttttgaagttattatatttttttttttattttttatgtgttattttatatttttatggtatttgattttggtttagttttttagggtttttttttagtaatagagaattagttttttagatttttttttatttagagtagttttttaaaagtaaaatttattagttttttttttaaaatttgatagttttttttttaaaaattttagatggtttttattgttaagtttatttataaggttgaggaggttttttataagttggttttattttttttttttaggtttttgtttattatttatattaattataattgtgtttttattagtaagtattgttattattttttttattattattttttttatttcgtatatttgtttttatttttaaagaattagttgaagagtatttttttttttaagtttttttttattttttaggtatagttgattgtttttgtttttaagttgttatggtattttaatttttttaatagattaaagttttttaaagataaaaattaaaaataaaaatatggtttatttttattagattttaagagtttagtagtgagttttggtatattgtaggtttttatatattaaagaattttttttttttatttttttttttttttgtttttgaaagtataaaagtttaggtatttaaattatttaattttggtttaatattgttataaaattggtgtgatagaattcgaatatcgttgagtgtgtatttttaaagtttttttttatttttttttattgtttttgttacgtttattttaggtgagttgttatgtgtttggtggttttatttaatttgttatgattttagtttagatttaatttaagttaatttgaatttttaattaataggttgtgtttttttttatttatttgaaagaattaaaataatgttttttgtttgtttgttttttgtttttcgagacgaagtttcgttttgttgattagattggagtgtagtggcgttggcgtaatttcggtttattgttatttttgttttttaggtttagtttcgaattttcgatttgttagattttttaaagtgttgggattatagtcgtgagttattacgttcggtttagaattaaaatattttaattttaaagatttttagaaatttagtttaattatttagattaaaaggaaaaatttaggttataattttgtggatttgagttttaaaagttataaatcgaatggttattagtattttttatgggaatataattttttttttttttttttttttgagacggagtttcgttttgttggtaggttggagtgtagtggtgtgattttggtttagtgtaatttttgttttttaggtttaagcgatttttttgttttaattttcggagtagttgggattatagatgtatgttattacgtttagttagtttttgtatttttagtagagacggggttttattatgttggttaggatggttttgattttttgattttatgattcgttcgtttaagttttttatagtgttgggattataggcgtgagttattatattcggttgggaatataatttttaattggataagattttatttttagtatgatagtgtttttgttttttgtttttttggagagagttttattttgtcgtttaggatggagtttagttgtacgatttcgatttattttaatttttattttttaggtttaagtgatttttttgtttttagttttttaggtatacgtcgttatgtttagttaattttttgtattttagtagagatagggttttatcgtgttgtttaggttggttttaaatttttgtatttaggtaatttatttattttggttttttaaagtgttgggattataggcgtgagttattgtatttggttatgtttttgtatttttttttgaattaaatttatatgattttaattattggttaggagaaacgtaaaggggtttatttatagagttgaattttatgttgattaaaattattggtaattttttttttattttaaattatggaagtttagatttgagtttttaaataattagaataggggatgtaaagaggaggtataattatgttttttgtttttttttgtttttttagggattggtttttattttataggtgtgtgaggttttttttttgggtttttaggttagattaagtatttttttttagtttttttatagttgttttattatgtatggagattaaatatattaaatatatataatttatatttatttatttatttattttttgagataaggtttggttttgttgtttaggttgaagtgtagtggtatgattatagtttattgtagtttcgattttttatgtttaagtaatttttttattttagttttttaagtagttgggatttaaaggcgtatgatattatgtttagttaattttttaattttttgtgggaatggggttttattattttgttagggttggttttaaatttttgggatttagcgatttttttgttttaatttttcgaagtgttgggattataggtacgagttatcgagtatagttaatttttatattttttttttttttagtagttaggcgcggtgatttacgtttgtaattttagtattttgggaggtcgaggcgagtagattttttgaggttaagagatagaaaattattttgtttaatatggtgaaattttatttttattaaaaatatataaattagttaggtgtggtagcgcgtgcgtttgtagttttagttatttgggaggttgaggtaggagaattatttgaatttaggaggtggaggttgtagtgagttaagattgtattattatattttagtttggtaatagagtaagattttgttttaaaaaaaaaaaaaaaaatgttaggcgcggtggtttataattgtaattttagtattttgggaggtttaggcgggcggtttacgaggttaggagatcgagattattttggttaatacggtgaaatttcgtttttattaaaaatataaaaagttattcgggtatggtggcgggtatttgtagttttagttaatttaagaggttgaggtaggagaatggcgtgaatttaggaggcggagtttgtagtgagttaagatttcgttattgtattttagtttgggcgatagaataagatttcgttttaaaaaaaaaaaaattttttttttagtaattagtaagttttttagaagtatgatagggttgtttgatttaatgttggttttatattattaggtatatgtaatgtttaaagtttgttgagtatagtatattatttttttgaagggttaattttttttagtttttaatggtaaaattttatttattttaatttttttttatagtttgaatttatttatcgatataagttagaaatggaaaatgttaaataaagtaagttattttttgaagtattttgttgttaaattggaaatagtttttattaaataaaaatatattagagttaggttaggcgtagtggtttatatttgtaattttagtattttgggaggtttaggtaggtggattatttgaggttaagagtttaagattagtttggttaatatggtgaaattttgtttttattaaaaatataaaaattagttaggtgtggtagtgtatgtttgtaattttagttattagggaggttgaggtaggagaattttaaattttagaggcggaggtggtagtgagtttagattatgttattttattatagtttgggggatagagggagatttggttttaaaaaaataaataaaataaaatttattataggaatattataaatataaaaagtagttaaagataaaaatatagaagataataaagttataaatagattaaattatttttttttttttttttttttatttttatttattagtaaattaattttatttttaaaataggtatttttaagttatagttttattgttattattagttattattattttgtagttggattataataatagttttaggttatttttttgttttaaattttttttttggagtttatagtattttaaataaaaatttaatttttgattttgatttttatttttaaatttattttatatgttttttttttttttttaagaaatatatttttaggtcggagagggtggtttatatttgtaattttagtattttgggaggttgaggtaggtggattatgaggttaagatatagggattattttggttaatatggtgaaattttgtttttattaaaaatataaaaattagtcggatatggtggcgggtgtttgtagttttatgtagttttagttatttaggaggttgaggtaggagaattatttgaatttgggaggtagaggttgtagtgagtcgagattgggttattgtattttagtttggttatagagtgagacgttatttattaaaaaaaaaaaaaaaaaaaaaaagtcgggcgtagtggtttatatttgtaattttagtattttgggaggtcgaggcgggcggattattaggttaggagatcgagattattttggttaatatggtgaaatttcgtttttattaaaaatataaaaaatttgttcggtatggttgtaggcgtttgtagttttagttattcgggaggttgaggtaggagaatggtgtgaatttaggaggcggagtttgtagtgagtcgagatcgtatattttagtttgggcgatagagtaagatttcgttttaagaaaaaaaaaaagaaaaaagaaagaaagaaaagaaatatatttttaatataatggatttttttattttaggatatttatataagtttttttttaaatttggaaggttttttttttttttttaggttaagttttgtttaggttgggtttttttttatttttaggttttagttttatgttttttttgattacgttattttaggtaggttttttttgtatattgattttattagtattttatttttttattttttagtttgttttttttattatagtaggagttttataggaagaaagtatgtttgttatatattttttttagtatttatattgggttatattgggttataatttttttataaatatttgaataaaaatataaaattaaaaattatgaagtattttaatgaaaaggataagattataataatgtaagttattagtttttaaatttcgagtaggatattattgttataaattttagttatgtaagataaattaaaatattagttaagaggtatgaaattttggttttaaaagtttagttttgatgtttgtaaagttaagttattaaatgtattttgtttgggatgcgaagaagtattatattgagtttttcgtttggtttaggttttagtagttattagttttttataaaaggttaataatatgttaaatttaagttatgaaaattaggtttgggagtggtaattcgaagatttagtataataaagtaaatttagttaggatttaatttaattagtatggtgattttttttagagatatttaggaaaatgaaaaattaaattaaagtaataggtttgaggtagagggtatagagaaggagaaataaagttgaacgtgaggggtagggttagagaaaggttttataatttgtgaggggattggaataataggtaggattttaatagatggagagtgaggtgtagttaaggtagttagtgaagagttaatagttggagtaaaggtgtaaaggtataaaggtatgagtaaggaaggatggttattagggaataagtgagtagtttagtatagttgtagtaaaggaaggacgaaagagggtaaagatagaattatatgtttgttttttaagaagatgtatgtatgtacggaaaatttggaggcgattttgtggatagagagaagcggtatatttttttttttttttttagaaggagatttaagttattaattttttttttttttttttttgagatagagttttattttgttattcgggttgtgtagtggcgcgatttcggtttattgtaattttcgtttttcgggttcgagcgatttttttgttttagtttttcgagtagttgggattataggtatttattattacgtttagttaattttttgtatttttagtagagacggggttttattatgttggttaagatggttttgaatttttgatttcgtgattcgttcggtttggttttttaaagtgttgggattattggcgtgagttattatattcgtttattaatttgttttttgaaatagttgtattattagtatttatgattttaatataagtatatgtatggtttaatgaatgtttggtattaattatataatttacgtttataaacgagaggaagaatttatttagttatattataaattttattatagtgggttttaagatttttaattttttaaattggaattatattgtgtttaaagttgattgtaattattagtatttgttaggaatcgtaggttttattaattagatttttggtgttttggtttttgttatatagtatttgatttataattattttttttttatttttaaagtttatttagtttagtagttaattttgtagttattatattgttatggtttttttttttttatttttattttattatgtaaatagttggtgtttttaattataatagtttttaatgtttaaagtttagagtaatattcggtcgataaatttataaagttataaatatttaattttggaaaaattgtattaatatttagtttttttaaaatagatgtttaagaaacgaattggttagtttgttattttaaaaattttaggtaattttttaatttaaatttgggataatttaaataaaagaaatttttgataaaattagtgttatagggtaaatataataataaaagtaaatttttgttaaaacgtttaaggtaaattaaagtaattaattaattaaaataacgtattttatttggaaaagagaatgtttggttattttgcgttaattttaaaataagaaatataaaattattagatttaatataaaaagtatgtttgaaattgaattaggatataattaagtgttatttaaaaattttttttaataatattttagtttaattttattttggaaattaattagattgatttttggtttattaatggttttcggggagaaaatatgtaataaattttttaaaaaatattttcgttgaagttaatgtatttttttttatttttgtaattaacgtattataaaagtggtggtgtttggtttgttttaaatttggtattatagtattaatatatagttttgatattttggttaaaggtttttttgtttttaaacgttaaagtatttttatttttttgattgttttaaaggttgtagttttggagtttttaatttggagtttagagatttggagggagtataagtattcgggatggtgtgtaaatttgtgtgtacgtgtttttggcggggaggggtgggggtgggggtgggggtggggtggtgagtgttcggttatttttagatttttaaagaagtttatggtttaaaaacggtttttggtcgggtgtggtggtttacgtttgtaattttagtattttgggagatcgaggtaggcggattacgagggtaagagatcgagattatttaggttaatatggtgaaatatcgtttttattaaaaatataaaaattagttgggtgtggtggcgtgagttagtagttttagttattcgggaggttaaggtaggagaatcgtttgaattcgggaggcggaggttgtagtgagtcgagatcgtattattgtattttagtttggcgatatagcgagatttcgttttaaaaaaaaaaaaaaaaaagaggtttttagaaaaattaataaatttttgtattagtattatatttagagaaagttacgaaaggtaaaaagcgtgtattttaattatgtaattatcgttaaatatttaaaacgtattttttttatattgagaaatagtttcgtgagagggaaaaaaaaaaaacgtatttttttatttagtgatttagattttgatattagttttttgttaggaaggttttttggaaaataatttggtttagaatgcggggaatatgggtttaagcgcgttttatttttttatataagtatttttcgatagattcggttttcgattttttttcgcggtcggggagggttttcgcgtatttgggcgtaggttcgatgagggtggtggtgtttaggtagtggattttgtaaaattttagtagggtcggtaaatggttaaatttttggttttcgattttaaaacggcggttgggtagcgagttgatgatgtagtgggagattcgcgagttttcggatatcgatagtatatagtttttagggtaggtggaagaatcgcggacgaggaatatatcgtggcgttggttttggagtcgggtttgcgttttttggcgagatatcggttttatatattaggcggagcggttcgaggagtcgaatttggcggaggatatggtgttggatcggggattttgcggcggtaggggcggcggttgttttcgtttgttttgtacgttttagttcggtagacggttttggggtcgaggaagggtttttcgtatatttcgaggagcgtttagagggttgggttagtatttttttttcggtttcgggttcgtagtatttttcgacgtcgttcgtttgtttcggggtcgttatacggagagagtcgttcgggaatgtacggtagagtcggggggtcggggtaggtaaattcgagtcgtagcggaggttatttcggggttttcgggttgttcggcgttttaggggtgtttttagtgattttcggtttggaacgcgtcggcgtcgtagttcgacgggtttttatcgattttcgtcgttatacgaggtatcgaattcgaaggagcgtcgcgttttcggggtgtttttgtttagtttgtttttaatagttatagtaataaaatggcggacgcgggagaagcggtagttattttttttttcgtttagcgcgtttcgtttgcgtacgcgttgggtttcggttttcggcggtcgtcggggttttttcgttacgttatatagcgtagttaattaggagtatcgtcgcgacgattagggtgggcgttggtcgcgttcgttttcgcgttttaggaggaggttgaagaggcgtcggcggtaggtattttttttttgggtcgttgcgcgtcgttgggggcgttgcggttgtcgggttttttagcgttggtaggaaaatagttggagtcgagagggaatcgcgtttcgaaaatttgtttttgggaataaagcgtaacgtgtaggttgaatcgcgggttagggaggcgtggtattgaggcgatttggttagtttaggggtttgagggaggttaaggattgataggtttcgatgggtcgaggtggtttagtaaaaggatgagtttaggggtagatgtgattattagataggtgattgattgaatgatttagtttttaggtggtttgataggttaaggaagttttagtggttacgtgattcgttaaatggagtgagaggagagagaaggtgagggttagattgatttaattaagtggttaaggaagtttataagtgggtaatttggttattatgggttttgaattgttgaaagtaaaatataaatgtttttcgggcgtggtttcgaggttttttttgtttcggattatgtttgtttttgtttatttattaatttttatttgtttttgtttgtttttttttttttttttttttttttttttttttttttttttttttttttttttttttttttttttttttttttttttttttttttttttttttttttttttttttttttttttttttttttttttttttttttttttttttttcgacggagtttcgttttgttattaggttggagtgtaggggcgcgatttcggtttattgtaattttcgtttttcgggtttaagcgatttttttgttttagtttttcgagtagttgggattatagttgttcgtcgttatgttttgttaatttttgtatttttagtagaaacggggttttattatgttggttaggttggttttaaatttttgattttaggtgatttgtttgttttagttttttaaagtgttaggattataggcgtgagttatcgtgtttagtttgtttgttttattttgtttgtttttgagataggttttttttttgttatttaggttggagtgtagtggaattattatggtttattgtagttttgatttttttattttaagggatttttttattttagtttttcgagtagttgggattataggttcgcgttgttatgtttagttaatttttttgatttttttttttttttttttttttttgagacggagtttcgttttgtcgtttaggttggagtgtagtggcgggatttcggtttattgtaagtttcgtttttcgggtttacgttatttttttgttttagttttttaagtagttgggattataggcgttcgttattacgttcggttaattttttgtatttttagtagagacggggttttatcgttttagtcgggatggtttcgattttttgatttcgtgattcgttcgtttcggttttttaaagtgttgggattataggcgtgagttatcgcgttcggtttttgatttttaatagagacgaaattttattatgttgtttaggttcgttttagatttttgagtttaaataatttttttttttagttaagatgtgagttatttcgtttagttatgtatgaaataagttaatatatgtaaagtgtttagaatagtatttggtatatagtaagtattatatgagttttttattattattatttagttattttttgggtttttatttttatattttaaaattttgagtatatatttttagtgggtgggtgagggtggagagaaaaatttttattttgttttttaattattttttattgttagatttattattttataattatttgttttttgtttagttttttttttttttttttattttgatacggattttagttttgtagtttaggttggaggagtgtagtggcgtgattttagtttattgtaatttttgttttttaggtttaggtttaagtaatttttttgttttagtttgttaagtaggtgggattgattataggtatgtattattatgtttagttaatttttgtatttttagtagagatagggttttattatgttcgttaggttggttttgaatttttgattttatgatttttttgttttagttttttaaagtgttgggattataggcgtgagttatcgtttgtaattttagtggtgattttttaatttttaaattttttgtagagatgaggttttattgtattgtttaagttgatttggaattgttgggtttaggtaatttttttagtttggttttttaaagtgttgggattatagacgtgagttatttatttagttgtttaatttttttaatttggtttttatttatgttttgattgaattaggttttttgggttttgttttgtttttaaagatatgtttttttgttgttgattttcgttttaaatttttaggtttaagtagtttttttgttttagtttttaaagtagttaggattatagatgtgagttatagtaattcgttttttgttttttaaatgtagagcgttttttatttttttatagttttttttttagtaggttaataattagtatgaagtatttaggggttatatttttggtgattttaaatatatattttaaaagtagaattaaaattgattatattttttgattattatgtatatattgtgggtatagtttaaattaatttttattatattttattgtaattgtttataaatattttttttattttaatttgagtattttgagggtagtttgttatatattattttttttatttttagtatttagtatataatatatatttttttttttttttgagatggggttttattttgttgtttaggttggagtgtagtggtgtaatttcggtttattgtaatttttgttttttggatttaagtgatttttttgttttagttttttgagtagttgggattataggtacgcgttattatgtttgattaatttttgtatttttagtagagatagggttttattatgttagttaggttggtttcgaatttttgattttataatttgttcgttttggttttttaaagtgttcggattataggtgtgagttattacgtttagtcgatatatatttaatgtatggtttttgaatgtagatggataaagatgggaggaagttagagaaaaatgataattgaatattagttgttggtttattttttttttagtagttttttttgttttagttttttttgttttatttttttagggtgtattatttgtttatataaattatttgtttttggttaggtgtagtggtttatatttgtaattttagtattttgggaaggtgaagtaggtggattttttgaggttaggagttagagattagtttggataatattgtaaaattttatttttattttaaaaaaagtaaaaatattttttttttcgagatagagttttattttgttgtttaggttagagtgtagtggcgtgatttcggtttattgtaattttcgtttttttggtttaagtgattttttttgttttagttttttgagtagttgggattataggcgtatgttataatatttggttaatttttgtattttttagtagagattaggttttaatatattggttaggttggttttgaatttttgatttcgtaattcgtttattttggttttttaaagtgttgggattataggagtgagttacggtatttagttaatgtaaaaatattgtaaaaataaattttttgttttttattttttttaaataaattttttttttagaaaaaagtaaagttcgggtatagtggtttatatttgtaattttagtattttgtaaggttgaggtgggtagattatttgaggtgaggagtttaagattagtttggttaatatagtgaaattttgtttttattaaaaatattaaaattagttgagtatggtggcgtttatttgtagttttagttatttaggaggttgagataggagaatagtttgaatttgggaggcggaggttgtagtgagttaagattgtgttattattttttagtttgggagatagagtgagatattattttaaaaaaaaaaaaaaaaaaagaattaaatattttttattttgtttttaaatattttagaggggaataaggtgtgggttagataaaagtgaaataagaatggttatgtgagattgataattattgaaattaggtgatatgatgcgagggtagggttaattatattttataatatttttatgtatgtttggaatttgttataataaaatttttgtaaaagatatttttttttatttttttttagtatagttgagataagtataaaataaattttttaggttgggtatgttggtttatgtttgtaattttagtattttgggaggttaaggtgggtagattatttgagtttaggtgtttaagttttagttatttaggaggttgaggttgggggattatttgagtttaggaggtcgaggttgtagtaagttttgattgtgttattgtattttagtttaggtaatagagtaagattttgttaaaaatattttaaaaaaagttattaaatgttgagatagtaaaatagtaatgagtagagaaatagaaagaaattattaaaaaagttgtaataggtcgggcgtagtggtttatgtttgtaattttagtatttttggaggtcgaggtgggtggattacgatgtaaggagattaagattattttggttaatatggtgaaaatttatttttattaaaaatataaaaaattagtcgggtatggtggtaggcgtttgtagttttcgttattcgggaggttgaggtaggagaatggcgtgaattcggg

SEQ ID NO: 513 - DNA, 61020 bp, Artificial Sequence
  chemically treated genomic DNA (Homo sapiens)
atgaattaaatgtttaaggaagggtaagatttggttatgtagaaatgatgggttgttagggagaaaaagatttgggaataaagggattagtatgtatagagaaaaggaagttgggaatgaagaagtagtgagcggtttatttttgttagtatagaaggtatagggtgataattaggtataaataaatttgtaaaataaaaaaataaaaaaaataaaaaaatttataaaaatattaggattaaatgatggagggtattaaattttgagtaaaatggttttgattttggtatatagttaaaagtttattaggttttagataagtagaatgatggatgagagttgtgttttaagtatattgtttaaatagagttggtatgggttgggaaggagaaaagaaagagagggagggaggaaagcggggagagagatagggagagggagagatagagtgagaaaaggagagagagagatattgagagagagagagagagattaagaggtatagaagtttttattttggaatatgatttggttttgtagtttagtttggagtgtagtggtgtgatttcggtttattgtaatttttgttttttaagtttaagttatttttttagtttagatttttaagggtatattattatgtttggttaatttttgtagtttttttttttttttttttttttttttttttttttttttttggtcgttgttgttgtagaaagtgtttttttatggtgtataggttggtttcgaatttttgagtttacgtgatttatttgttttgtttttttaaagtgttgggattataggtataagttattgcgttaggttagcgttttttatttaatgaaaagaggtttataatagtttagttgagagatatggaaggtttaaatgttgtttatatatattaattatttaataaatattagttattatgaatttaattgtttttaaaattaaagaaaaatagttgtttataggtgtaaaatgttatatttaatattgaggtaaaatttttttttttttagttttttaatattttttatagattttgagtatgtttgttatattttatggtgtattttgattatttaggtatgagtatggttttgtaatggattttagatttttagaagatagagattaggtaagatatttatttcggaattttttatattattttatagttagtaggcgtttaagaaatataggttttttttagtagttgtttagtttattttgaatttaaagtattttagattaagggattttaatttttttgagatttgataggagtagtgaatttaagtttttgagatagtggtaggtggttgagagttttgtataaataggataaaattttatttttatttaaggaggggtaagtgaaatttttattttattattgaatatttatttatattttttgtttatttttagaaaaaaatgatgtttatttgtttattaatttatttattggatttttttttgtaattttttaagtttaagtttaagtaaagtaatttataaaatttaaggttagattataggttagaaaagttatttattttagagttttaaagttggggtttagggatagatatttataaatgagattggtaaagataaatttagtgaaattttatgtaaaattgtgtgagattttttatagtatattttttataatagagagggtttatagtaatagtgaggtttttaaaatagtttgtgatattaaaaatattatttattgatttttaaatttattatattatgaatgaaatgttgtgaaatattttatttttttattaaatgttattgtataaaaggttttattttagtgttattttaaaatttatagataggaagtttttttttaagtttattttaatttgttggtagtttttttttatggaagtttttagtaaattcggtggaaatagtaaatagttgtttattaatatttattttaaagaaagaataagatattttttatatattttaagttgttttaaatgttttttttttggtaaagaagaaaaaaagaaatatatttttggtttttaaatttttttttattcgtgtgtatttttgtaaaaatgttatttatatggttttgattgtattttttataagttattagaaatgttttgtattgagaatttttttgatgattaaggtgttttcggagatattttaaaatggtttttttagtttttttttatagaaataggaaagttaaattgagttaaatgtaaatgaattaagatttggaaaggttggtattttatttaaaatttagaaattataaggttcgagtgagttttaaatttgtttatgtaaagtttttatttttttttttagggataagatatattaaattatttattgggatgggatatagataatgtaatggatttagatatttaagttgatatttagggttgggtgtagtgattttataaaattttaagaatttttaattattttagggtttttttattatttttagaggataaagattttggatttggatttgggtgttgaatttttgattttattatttattagttatattttggtatatagttagtttggtatatatttaagttttttaagatttaattttttatgttataaagatgggatagtattatttatttatattgtaaagtatttttagaattgtaagtaataatatttagaatattgtaaataaaatgtttggtgtacggtaaaagtttaaaatttttttttttttttttttttgtgtagtattggttggaattagaagagttttttttttttttagggaaatattgattgggtggggtgaggaagagaaagattggatagtattttaaagtattaagtttttattttttaaggtatgtagattataatttattttgggagattgattataaggaaagggttaagaagaattagttagaattttggtttttatttgaagttgtttgattacgttgttttagattgattttagaattgtattattagtagggtagttgttgtttattaatagttatggaagtagattttagttgggggatgatggggaaataaagagaaagatagggacgaataaaggaaggaatggggtatagatagaaagagagagagagaaaagaaagaaaggaggagaggtaagagatagtgatttggggttttatatcgcggtgggtgggagaaggagtgtgtgtggtgggcgtattttttcgtggttagaattaaagttagaattgatttggggaatttgtgtttaagatttgaatttggattagaagttaagggaaagagaaagttgtttaagaaaaaagggagaaatttttattaggcgaaaatagaaatcgttgattgggtttgtggttggagagttgttcgtggtgttgatttttttttattgggattttagtgaaggttgagaagttttgtattggttgtttttttttttttttttttttttttttagttttgattttttgagatttaggattattttggttagttcgatgtttttttttttttttttttttttttttttgtcgattaaataatttttttcgagtttttagtttattatttaaatattttttttttattttgttttaagatttttttttttttaattagtttattggtttttagattgttttaggtttttttggtggttatattttttttttattattttttgaattaaaaaataaataaaaaatatataatggtaattataaaagtagataatatgtattgagtatttattaggtgttagggagtagtttaagtgtttttgtatatattaatttatgagtagtttaagtgtttttgtatatattaatttattataattttatattaattttattagatgggtagatatattattattttattaaatagataaggaattgaggtttaaggggtaagtgattttattaagattagatagttataggattttaatttttttggagtttgtatttttattgaatttggtttttttatatattttaatatttttttttatgattttttgtttttttatttggtagttttaatgttttttatttttgtttaatttttaggggattagggatttgtattgttgatttggtttaaattagaagggaagtaaagtaaataaatatattaaatgtgcgttgtgtgggaattattatacgagggttttattttttgttttaggaagaggttttatgttagtagttttagtttgtatttaggttgattgtagagtattttgttttttatttttatgttttagtttttgtattttcgtttttttttcgtttttggtggtttttagagaatttcgtgtttttttagttttttttttttatattttgtttacgtagagaagtttttgttttattttgggaggttacgtgggttttcgtttatatatcgagagaaataaatagtgttaaatatttatagagagacgcgtagatataaacggatttatacgggtaattttcgagataaaatttatattcgatggatttacgcggtcgtggaaatatttgtcgttttagaaatatttaggtattcgcgatatatatagtatagttacgtttaagggtattaggatttcgggtttgcgcgtatgcgcggtttttttggatgttcgtgcgtatagatataatattttatacgttttagatttacgaaattttttacggtttagttttagtttattcgggtcgtttttttttcgaggcggtttttcgtttttttttttttcgtttttttttttttttcgtttaaagatgtataaaatatttttcggaagtaatttcggcgtttagttttttttttttcgtttttcggtcgtcgtttttttatttattttcggtcgtcgtcggttaagtttttttttcggcgtagttcggttttcgtcgtttttcgttcggagatcgcggcgtatttggatttttttttttattcgttagtcgtttcgttttcggattttacggttgtaaattgatttggcgcgcggggaggaggagagcgtaggcgagcgaattcgcgagagagggagagagcgagcgagtaatagcgagagcgagagcgagagagtcgggaggtagagggagtagtgatcgtttttcggagtcgggatttatgtttgttttcgggattagcgaaggggattttacggttgagtatgagttaggttgttaggagttaggtatttttacgtttgtagttttcgcgtcgtgttcggaatgcgagttgtacgtagggtttttttaagtttttatcgagtcgaataaaaagcgttttttcgtagtttttcgttaaagacggatattgattttaggtaaggcggcgtcgggtgtagcgtttcgtagtttcgttgtttttggattcggtttcgggtcgtattcggggcgttttcgcgtttttttgtttttttttttatcggtatttttgttcgttttttatttggtcgtttcgtcgtttttaagttttttttagttttagggagggggtttttgtgtttggggtttaaagggttaattgcgggtttgagtgagtggcgtgtgtgttttcgcgcgttttcgacgtgtgtattatggtgggaatttgatgtggtgttagtgtgtttgcgtgtgcggcgtcgtttgcgtttgatgcgtgtgttcgtggtgtgtgtgtgtgttcgtgtgtgtaagggaggggtgaagagagagaggttttataatttatttacggcgcgatgtgtgtgtgtatgtttgtacgtatgtgtttgtatgtgtgttttcgtgtgtttttttaattaggtttttttagtttatacggaatgggatttttattataggattacgtagttatcgggaaattcgttgtggatttttttttggggttttgggtttggggtttggggaggattatggggttgtagatggtattttatttagtttaatgttggtacgtttgaaggaaaatttttttaaacggtggaattttgttatattgggatttatagtttaatatgaaagagatatggttaattttcgaggtaaatgagacgttgttattttaaattttatattgggtagattttaagattttgatgggaatttggagatattggatagtgggtgatagagaaagggggaagttagcggtgggttttttatttggggtttggaaagtttgggatagggatttattttgtattttcgtttgtaattaatagagttttttcggtttttgttggttttggggaggatttggtaagtttgtatggattttttttaggggaaaggagaaagcgttttcggggatttgtttatttattatagttgtaaagggttttagaggaaattttatttggggcggttgtggatgatatggaaggagatggatggggtatttttttaagatagattcgtttttttttttttattttaggcggggaagtttttagagagtttttttttaaatatgtttttttatggtttttttggagttagggggatattgagagaaggtagagaggtggagagggagagagagagagtaagagcgagagagagggagatagagagagagagtgttttagtattgagggagatttataatttgaaaaggggttgtgagtgtggaatttatgatagaatgtggtagtaattgatttaaattgttgtcggtttgtatttcgcgttttttatttggttttaaaatattgttaagggtaggggggcggtggaggaattttagttaggaaggtagtttgggttaaggttttttttttttttttttttattttttgggaggttttttaggtaggttttttggttattttggtttggtattgttgggtttgggttttggggttagttattgatttgatttttagttgttttttaaaggtttgttttatttagtaaaaatgttgagttttattgttgttagtatggtttttagattcggtagttgttatttttttaaggtaagcggtagtcgttttgtttttaggtagggaggttaggagaagataagggttgtgacgttgggatatagttttttgtttagtttagtacggaggggtcgttgaaaagtttttttaggggaaaaaagtagaaatatatttggtttaaaaaatgtatatatatattttaggaagatatatatatatatatatatattaattatatatatatatatatatatatatgtgtttatattttggggagagataaaagtaaatatgtatttgtaggaatttgttttagtgggtgggttttatttgtaggtatttgtagatatattattttttgtttagaggttgatattttaggttgaagtttttatatagttatagagaattttttttaggaaatttatgttagggtagagttttttggattattttgggtagggggtattagggttaaggaggagatttatttttgggaattgttttatttttttttttttttaatttatagacgatcgaaattggaaggaatattaaagagtagaaaggtaggattttgtggtttaaagagggaatgagaattttttaatatttagtagtgggttagtggtatgtttaggattagaatttaggtttattaattagttagattaatattttttttattttttttagtaatatatattttaggattgtatattgtttttatttttattttgttaatttgttattatgatttttattaagataatcgtttgtttttttttattaaattttatatttttagagatgtattttagggtttttttatttggaaatatggttttgaagagaaaagatttaatgttttaattattattttcgaaagatatatatatatatatatatatatatatatatatatatatatatatatatatatatacggtggtggggggaggattgagagagagatagagagagaatatagattttttttttaatgtttttagggaattatcgataagtaaggatttagtattgagtgtgattggtaggtagaatttagtaaagtgtttggtttgtatttaagatttttattaaggaatgtattggtttttagagagtaaaatgtatatttatttattagtgtaaatattttaggtaaattaatttttttatattaattagaattttatttttagatattaatatatattataggtatagaagtatatgtaagtatatatgtataggtgtgtttatatatatatgtgtatataaagatttagaaattttttttgtttgttatatttttaaaaaagagaatttttatattaaattgtgtttttttatataaagtattttttatgtgaagagtaggatttataaattttagggaaggagaaatgtaaagttttgtgaaagagagattttggagaagttagaatcgagtttatttaaaagcgtgtttttagatttttagatgtttgtttcggggtgtaggtagatattgaaaaatatgggggttttaggtttatttgtaatagagttttttttatgtaggatttttcggggttagatggtattttagtttttagaagggggagttgtgattttattttaattaaggagaaatagtttagagatgttaaattagtttttgggttttcgttgagtttagacgatttagtttaggttgtaatgagtatttttgtcgttggtataggtaagaattgtaaaaatatttttttttgataggttcgaatttaatattttttttttagtgtttgtaagagtttatgttatggattataaagttttttatttttttgaaaaggtttttgtttaaaggtttttttagttgtgtaaggagatattttttgatttgtaatttgttttttttttttttttaattttttagaggaaattattagtatattattatttgaatgggttattaaggttagatatattttattcgtttttttttgttttttttttgttgaaatataaagtttaataaattggttgttgaattattggtaattatgttaaagataagatggaggttatgtgaagaagataggtttttaaatgttattttttaaataatttttttagttgtgtttttttttgtaaagattatttttattattttttttattattttttatatttagttacgatttttaataaaattttatttatattttaatatttagtttaaatgatttttttaagaagtttttttaagattttattttggaattaatttttttattatttgatttttttgtattattttatttgaaattttattttagtttgtgtttttgtttgttttgttttatagcgttgggggtataggtttattttattttttttagtatggttttaggagtatttttgtattttagggattgatatagagtagttgttttataaatgtttgtttttgtattttttgttgtattttaatagtaattgttatttttttttttgttttttatattttttagttaataattgttttatgtttatttaaagtaatgtcgttacggtatttttgtttatattaagaatatggggattttaatgataatatagatagatgaaaattagattttatttggaagtgaatattgattttttgtgttttagggtttttagttttgtttttttatgtagtcgttttttttatttagtgggatagatatagttttttttatagaagaggaaagtgaagtttaggttggttagattttttgattaaggttatataattattatagttagaatttgaaattgtttttttttttacgttatttttgttttttttattggattattgagttaatggtaattattatgaatggttggtaatatcgggttgtttaataggtgttaggaatagttgggagttattatgagttttttgaaattgatggtatgaaggtgttatgagttattggattaaagaaaatttttgaaggttttttaatgattaaatttttttgtttttaggaatgacgagttttttttgtaatgttaataatatatgattatttagttttagttttagtatttttagtgatagtaagtttattatcgtataaattagtttatgttatatttgaagagttttgttggaatatttttttattttgtttttaaattatttttttatttatatgtttttgaaattatataagtgtaatttttttttagtttttagtttttcgaatattatgaaaatataattattttataatagttttttttttgaatagaggggattgtttttatagttttgttttttgtagtatttgtttggaggttttttggtattttgaatattgttttagggaaattgtttagtttattttatttttagggtttcgatgttattaaaaaaaaaaaaaaaaaaaagggagggatgatttgaaattgagtgaggatttatttaataaatatttattgggtgtttattgtttgttaaatattgttgtagacgagagttgttaaatagaattgtttgtgatgatggatatgttttttgtgttgtttaatatggtagttattaattatgtatgattgttgaatatttgaaatgtggttagtgttgttgatgaattgaatatttaattttatttaatttatattaatttttattttaatttatatagttatatgtggtttatggttattttattgaatagtataggtttgggttttagaaatgtagtatgtatatggttatggttttgtttgtttttattaagtttatattttagaggagcgagatgaataattaatgagtaaataaatagataagtaagataattttatataatattaaatgttatattattagtcgtggtaatgtggtagaaaggaatgtggatggtataattttcgattgagtagttaggagaagttttttttgagaaagtgatgttggaattgaggtttaaatgagaaggaattagttatgtaattttgtggggaaagagtattagaggtagagagaagaataaaatggagttggttaggtttggtggtttatgtttttaattaaagtattttaggaggttgaggtgggaggatcgtttgagtttaggtgtttgagattagtttgggaaatataataagattttatttttataataataataattatttttaaaaaaatagttgggtatttgtagttttagttgtttcgtaggtcgaggttggagaattatttgaatttgagaggttgaggttgtagtgatttgtgattgtattattatattatagttgagtaagtagtagagtaagattttgttttaaaaaataaaataaaattaaataagttacggagttattttattgggataagtttaggaagtttaagagatggattatttgttagtgtggttgaagtttttaaattgggaatatgatataaaagggaattaggaaggtaggtaggggtagattataatggtttgtataggagagtgagaagttttgatattttttttttgatatttttggttggaaggtaggtagtttgaggattaaagagagtttgagaattgatagaaggttattgttaagtatttttgatgggtttttattatgtttatttttaattagtaatttttataagtttttttattttaatttttatttttattttgaatgttatattttggagatataatagtgtaaagtgaggaggagaaataagagtaggggaaatggatagaaaaggaaggagagaatgaatatgtggggataaagtaatttaaatgaagtgttgtgaaaaagaatgaaagttggaagtttttagtttggattagtaaatatttattgtatattttgtcgtggaaaggttttggataaagtgatttggggggtatggtgatgaattttgttaggtgttggtaatttaatagtatcgatttgtaaatttataaataattattatttatgatagattgataattgttattttagaagttttgtgagaattttgggtaaggggaagtttaaaggaagatattttagtagtgatagtggtgaggaggatgtcgatagtgaattataaggttttagagattataggtagtatttttttttgtttttattaattcggaatattatataataagagtatagggatttagggtatttgattttagttttggtttttattattatatatttagatttttttaagaatttatttttatttttttaggtttgttttttgtaaattgagaagggtttagttgtggtttgttttattgaaggtatattgtttggttttatgaaaatgttgtagttaggtatggtggtttacgtttgtaattttagtattttgggagggcggaggggttgggggtgggggggtggtggattatgaggttaggagttcgagattagtttgattaatatggtgaattcgtgtttttattaaaaatataaaaatagttgggtatggtggcgtgtgtttgtaattttagttatttaggaggttgagataggagaatcgtttgaattcgggaggtagaggttgtagtgagttgagatcgtattattgtattttagtttgggcgatagagcgagattttgtttttaaaaaaaaaaaaaaaaaaaaaaatgtaaaaattgtagttgggcgtaatggtgtatatttgtagttttagttatttgggaggttgaggtaggaggattatttgagtttgggaagtagaagttgtcgtgagttaagattatgttattgtattttagtttgggtgatagagtgaggttttgtttgaaaaaaaaataaaaaaaagaagaagaagaatatgttgtatgataaagtttttgtaaaagtagagagagatatatatagtagttgtgtttttttataagatttagatgttttttaaaaaataaggaaatttaaaagaggttatattttatagtatagattgtgtttcgagatagtgtggttgagtggtggtgagatagtgattttatgttatggtggtaatttttgatattaaagtgattaagggttaatatgaaatttattgtttttatggaatatagtagtttagaaagattgtttagagatttatagatagtttttgttattgagggggtaaaaaagataattaaggagataatgaggttgagaaaaagtgaaattaatttttttttttatatgagggtgaaggggatttttgttttttgagggaattattttttggagattgtaagtggttttaaggagaatagattgaatgagattgggtatgagagagaaagtgaagagttataaattattcggattttttgttatttttatataggaatggagagtttggtgaggatataaaatatattattttgaataaattttgtttttagtttgtagaggtttttttatagggtgcggagttgtatatcgggaagttggggttattttgggatagttaggagattgtatttttttaagggtggtaggtagattgataaggtaattaataaaagtaatatgtaattatttttgtgtaaattgtaaaggttagagtagtagggtttttagtaaatggtttatgtgaatagttagaattttttgtaagggttaatttagtattggttttgggaggtttttaagatataatttatttagttttgtaaaggttttataaatgagttattgggaatttttgtgagaaataatggagtttggggataatggagaatagtcgcgtttagttacgttatagattataagttgatttagttggaggaaaggtagatatttaggatatgattgttttttggggaaaaagtggtgaatttttaagtttttattttaagatttagtaatttgtaaaagtagatgaaattttagtaggttgtggaatttttagagtttttaggagttttaagataaatttagaagagtaaatagagagttgtgaaagagataattgtttttcgtaagtacgtacgtttttttttatatggtagtggataagttagattttttatggaatttgatgggttttgagtttataggcgtatgataaaggaaggatttataggaagtttgggttgggacgataaaaatatttgtataagtataggggttattagaaaagaaaattagtattttggtatgtttaggaaagattgaaaaatagattatttggtaagggttggtaatatagttttgttgttgggatatattttggagatatagtttttttaggtgaagtggtttatattaaatgttattgttagagttagtcgaggttagggaggattgagagagtttataaagaattttattttgaatgtatattaataggataataatattgaaagtttagtgaagttttgtaagtgatttttgaaaatattattaagttagttttagtttttgtttatcgtttttttttttttgatagtgggaatgatatatgtaggtagagtatggattggaatttgaaggggttttggaaggatttttatttataatatttagagatggttgaaatgttattgttttaaagtcgtttttggagtggaaaagtggatgtgttaagtatgtgatatattttttgtgttgtaatggatatttgatgtagatattttattgaatatttttaataagtttatgtataggtagtattgtgttttattttagagaggttgaaattgagtttagagtagtaatgttatttgattaaggttatatattgagttaattgtgttttgttgtggatttgaatttatttttttttgatttgaaagtatagaggttgaaagtttgggtttgttggagtttgaatatttgttttgttatttattagttatttgatgtggaatatattatttgatgtttttgtgttagtttttttatttgtaaaatgagtattgtaagaatagtaattttaggtttggtatggtggtttatatttgtaattttagtattttgggaggttgaggtaggaagatcgtttgaggtcggttgtttgagattagtttgggtaatatttagtaagattttgtttttataaaaaatttaaaaaataattagttagatgtggtggtatatgtttgtagttttggttatttcgggggtgttgaggtaggaggattatgtgggttaaggtgtttaaagttgtagtgagttgtgattatgttattgtaatttagcgtgggtaatagagttagattttattttaaaaataataataataataatagtaattttatagaggtatgtgtgtatttaattagtttatatgataggtgttttagatagtgtttggtagattattaatattatataaatattaattgttattgttttttatgatttttatttttttttatattagattagttattgtttatatttttaggtatgtgtttaaattggaaataatatgtagaaaaaaagtattattaggtttaaggtattgttttttaaatgaatgtgtttaattatttttattaatttttttattatgtggtagtgggataatagtgattagaggagagagtgagaaagtagaataaggcgtgggagaacgtaaaatgatagaggtagatttttaaattttttataataggttagaaatgagatatagatgtaaagattagatatagatataggattatttattataaaggtagaaagttatttttaatataatttagttgaaattttaattttttttttttttttttttttttttggagatggagtttcgttttgtcgtttacgttggagtgtagtggtgtgattttagtttattgtaattttcgtttttcggatttaagtgatttttttgttttagttttttgagtagttgggattataggtatacgtcgttatgttcggttaattttttatattttggtagatacggggttttattgtgttgttgaggttggtttagaatttttgattttaggtgatttgtttattttagttttttaaagtgttgggattataggtatgagttattatgtttggatttttttttttttttttttttttttaatatatataaattttttttaagattaattcgtatttgagttggttttagaattttcgttttgtgtagtttattttatttttgatttggttttttaatgtataagatagggtatttattaggtgtatatgggaaagtagatgattgatagtatgatggatgtttttgtgtgaattgtgtttattaattttttttttatgatttttttttttatttttatttttatttattttattaggtgtttgtatgttgttatatgttatattttatttaatttttatagtaatattttgaaattgtaattattttttttattttttagatgagaatattgtgggttagaggtaaaaggatttgttttaagatatataataagtgagagtattaggttttaagtttagtgtatgttattagtaagtgtatgttttgtatgtatgtatgttttgtttttgaattgttatttttttatatattagttgaaggtattgtggattagtagtttggtggtgttttaaagataaggttgaatattgttgtttgatttttattgttttgggataggttagttattgtaaatttttatgtaatgaagtttgttatgtagattttgtttttaattttgattttgtatatgtttaaatgagaaaggtatttattttttatattttaggagatgttataaatggtgttattggaaggagtttttttaaatttttttaataatttgcgttttgttttttttttttatttgttagtattatgaatattttttatttttttagtgttttttggttgttaattttatagttttttaaaatagtaatttaattttatagtgtttcggtaggaaattttagtttagtatgtttatttgtatttttagtttaaatgttgttgatattaggattagtagttatagaatgagttgttttttaattttgggttatagttaagagttagaattttattttttttgggagtagaattattaaagttattagttataatagtaatatttttttaagttagtaaatagtagggttgagttagtttaaattgtgatagttagatgttgtaatttttttgtttgtttttgtttttttttttgttttatttatatatatatatatatatgtacgtgtatacgtgtatgtataaagaaaggaatattgaatatggttgagaataggtagaagagtagttgatatattagaaaatgtttaaagtagatttttttttttttagtaaaagaatatgagtttagatatggtattaagattatttattattagaagataattttggggtgggatttttatttaaaaatggaatgaggaatatatgtgattaataaatgtaaaaaatataggatattttgttttttagtaattaaataaatgaaaatagtaatgcgatgttattattaaaatggttttttaatttaatggtagtatttagttttggtaataatgtaaggaaaagaatattgttatatagtattggtggaaatttatattgagtatatttttttatgaaatatgatttttattttgttataaataaatttttgttttttttttttttgagacggagttttattttgttgtttaggttggagtgtaatggtgcgatttcggtttattgtaattttcgttttttaggtttaagcgattttattgttttagttttttgagtagttgggattataggtacgtattattatgtttagttaatttttgtatttttagtagagatgaggtttttattatgttgtttaggttgggttttgaatttttgattttaggtgatttatttatttcggttttttaaagtgttaggattataggcgtgaattattgtgtttagttaaataaatattgtttattgagtatttattttttgttagatgtttttttatgagttatgaatatagtagggaattaaattgattaagtttttattattatagagttgatatttaattgagaagataatttataaataaagaagtaaatatatagtgtattggagagtaaagtgtgatagagaaaaaggagataatgtatgtggattagatggtttggtgagagaggatttggtattttatataggtgggtaggaaaagtttttattgggatggtgatattggagtagagatttgtaggaagttagggatagagttaggtggatatttgggggaagagtattttaggtggagatagtaagtataatatttttgagatgggattgttagtgtatatagaaattagtgtgattgaagtggaataattaataggaagtagggggagaaagaagagatatattattgtgaaagtaggggttagatttttatttcgatttttataatttttatttttatttttgttttttatttttatttttatattaaatttttaaaaagaaaagaaggtgtaaatgtttttgaggaaaaaaaaagtgtttttttttaagaagttagttaattatatgtgtataagtttgtgaagaagaaatgttattagagtgtttggagaaaaaaggaaaataaaatagagtatagaatggaattttttgtggtttttaagaatgatattaggaaagtatatttgtatattagaaggtgggatgaagatagggtgtatttttttttttttttttttgagacggagttttgttttgtcgtttaggttggagtgtagtggtgcgattttagtttattgtaagtttcgttttttaggtttatattatttttttgttttagtttttcgagtagttgggattataggtatttattattacgttcggttaatttttttgtgtttttattagagatggggttttattatgttagttaggatggttttaattttttgattttgtgattcgtttattttggttttttaaagtgttgggattataggcgtgagttatcgtgttcggtcgggtgtattatttttaaatagagttgataataatagtattttttttttagttatgttgttgagaatgaatgtcgtatgtataaagtatttcgtaatatgttttatatatagtaagtatttaataaatggtatttatgatatttattaatattaaatttttgtgaattattaattttaaaaagtataaggtttaaaatattatatagagtatgattattttatatgatgtattttagtatttgaatagttatttttgggtgacgggttgtagtgaattttattttttgatttttatttgtattttttaatatttttttaatgaatgtgatttgtttgtgtagttagtattttaattagtgggatatgggggattagtgagtaatttgtcgtaggaataggagttaaagtaggggagaaagttttagttttgtttttttaatttttaagttatttatttattttaaattaaatttaaatagatttagtttttttttttgttttgtttaattttggtttgaataataatgtttataaaaattggaaatttgttaagtgatttatatttacgttttttttttgagatagggttttattttgttgtttatgttggagtgtagtgatatgattatagtttattgtagttttggatttttgggtttaagtaatttttttgttttagttttttatgtagttgtgattataggtatatgttattatatttggtaagtttttatttttattttttttttttagagacggggtttttgttatgttgtttaggttggttttgaattgttggttttaagcgatttttttgttttgattttttaaagtgttgggattataggtgtgagttattatggttggtttgatgtatatattttttggatttttatattttttgagtttttttatttgtaaaatgaagtttgagattcgatggagattttaagaaaattattgaagtttattataaaagtagggagaggttgagtaggtgagtttggatttgagattatttttattttgttatttatattagagtagttttatgttttttatttgttttattatatttttgtgtaagttttgaataaggggtttttaggttttaaaatatgatttgaaattattagtttatattttaaattatttttaaaagtggatttatgagtgatggattttgttttatttttttatttaatttttattaatattttgtatagtatattttaggaaattttatattagataaatgtattttttataaaaattagaatattaggtatgttaaaaaatgtatataagtaattttgatgatttatattattttagatatgatgatgatatttttaaaaaattattaaagaataataagaagggaagttttttaatggtaagaaggggtgtttaatgtaagttttattttttttttttttttttattttttttttagtgggttaagggagagggaggggttaaagatgattttttttaagattgttttagatttattgaggtttgttttgtttaaatagtgtttttaggaatagtagggttttaattattttatcgtgggttgtgaaattgtaaaaaaaaaaaaaaaaaaaaaaaaaaaaaaaaagtgtttaaaataaaattaagtttaatttgttttaattgaaaaataaatatatgttatgtatagtatttttaataggaggagaaagggttagaaaatgaaatgaatagttgggtgtagaaggtttttaattattggatattttgaaatgggaattggtattgattgagaaaataaatttagagttaaatttagggatagaaaatgtgggttttttttttaagtaatagtttttttaattttttatgatgatatttttattattattaagaatataaagtagacgtggaataaaggaaggaattttaatatgagattatagagttggagttttattttaatattggcgttatgtgatttttggtaagtgttattttttagttttaggttttttatttgtaaaatggggataattatttatatattattggatttttatgaggattgaatagttaatatatatggaagttttaaagtattgttaagggatgatgggagaaggataaagaggaaaaggagggaaaggtggaggaaggttagaaggaggtaatgaaaaataaggaagaggaagagtattataatgatttgattagtttatttaagtttaatatttattgagagttttttatgttttaggttttgtgttagatgttgggaataaaaggaaaagaaatagttgaggtttgtttcggtggtatcgaaattttattaatagatgttttgaatttttaggttataaaatgaagttaaggaggagattggagttatgggaggtgtttgaaaagttttgaggtatgttttaagagtttttttttttagtggttattttttttttgtatgttgattttattttttttatttaaatatagatattttggttttgatttaggtttttatttttttaaagaaaagggtttggaaattttatttgtatgaagttgatagtgatttaagattgtaaattatagtgttagagttatattgttggtatttttgaattataagttgtaggattttataatttattaaatgttggaattagagaattttagaataataaaaatttagttagaatagatttatagagtataatatttatggaatataaaaattaaatttgattaggtatggtggtttacgtttgtaattttagtattggggaagttaaggtgggtggattatttgaggttaggagttcgagattagtttggttaatatggtgaaattttatttttattaaaaatataaaaattagttgggtgtggtggtgtatatttgtaattttagttatttaggaagttgaggtaggaggtttagtgagttgagatcgtattattgtattttagtttgggtgataaagtgagattttattttaaaaaagaaaaaaagaaaattatattttagaaattatagaattatgaaatgaaatgagagttttttaaaagatagtagtattttgtggttatttggtttattattttttttaatttaaaaaaaatatatatgtagtattaaaatataaatatttttgattataattatgtaggaaaaatgtttatgaaggaaacgttatgtttaataatattgtgttaattatattgattaaaggtattgatagtaaagatagatggagtttttgtatattataaaagttttttttgggatggttgttgattttacggatatttaagataaatatttattttgagtaatagaaaatttgaagtaggttgggtgtggtggtttatatttgtaattttagaattttcggaggttgaggtagaaggattatttgaggtcgggagttcgagattagtttggttaatatggtgaaattttatttttattaaaaattagttgggtatggtggtggatgtttgtaattttagttatttaggaggttgaggtttgaatttaggaggcggaggttttagtgagttaagattatgttattgtattttagtttagttgatgaagtgagattttgttttaaaaataaaaaaaaaataaaaaaataaaaagagaaaaaagtaaagaaaatttgaagtagaataggaataatgattttgtttattgatttttttattataattatttatgttggtttaatttatttatgatgttatgttagaaaataagtttttaaatatcggttttttttaggattgtaagttttaagagggtataagtgatatgtgattatttggtttttatggggtttgtagaaaagtgttttgtattgttaggtgttttgggagtttagttttaatttttttttagcgtttttttttgtatatatatgatgaattattgttgatttttatttttgtgttttttttgaagtattggtttgtattgttaagatttttttttttttaaatttggtatttattttatgtgtggtagttgtttgtttcgttttttacgtttttttataggattttagatttaatggtataatttgatagatatgggaagaattttgtttaaagaagtgtttagagtgagtagagttttttatttcgtattagggtagttttgtgtgtgagtgtgtatgtaagtgtgtgtgttgtttatataaaatgtaagtttggaagttttttacgtgtaaatgagtttgaatgtgttatatggatttttaagtgtattaataagtggataaatttgtgtggatataatgtgtttatgaatagatgagaatatatggatatagggaggggaatattatatatttgggtttgtcgggggttggggggtaagataagggagaatattaggataaatatttaatatatgtggggtttaaaatatagatgacgggttgatagatatatataaattattatggtatatgtatatttatgtaataaatttgtatattttgtatatgtattttagaatttgaagtaaaaaaaaaaaaaaagatataaatatatttgtggtttttgatatatatttgttgaatatttattatgtttttgataatgaagtaggtatatttttatatatatttgattttataattatgaagtaggtattatagtttttattttgaagatgtgttaattaatattgttagaattgagtcggttagggttagtatttgaaatggagtttatgtgttttgaatgtgttgatgtgtgagagtagggatgtgtgtgtgtatatgtttatggacgtgcgagtgtgtgtgtaatttttttttttaatgtgtattttttaatatatgtggagagatatatttttatattatatgaatgtgtatgttataaatatatatgtattagttgatatttgagttatttagtaaagtaaatttatgtggttgattttagggattaggggaatgtgaattgtatgagttgtaggagaaagtatttaagagatagagagcggtaatttagtataaatttattcgtgttattgacgtggttgtgtgttttttagtaattgtatattataagttattaatttttaagagtttgttttaaaagtaagtatatttaggttttgtttagatttaataagttagattttttcgggtagggttttgatttgagtgttttgttaaagtttttttgttttaaaaagtattttagattaagattttttgttttggtagtttttatttagagtagttgtttttagatgttggtgtgtgtttttattatacgttggatgttgattgataggtaggattttagtttttaaagttttggaattttatttattaagtttatggttaggatttaaaattatttaaagagtatttaaatatgttcgttttgagtgattttgaaattgtagtttgtgaattgtgtatttagattttaaagtagattttaaagatggaagaagagggagaaaaaggaagtaaatgttggagagtgtttatgatatagaagtttaagaaggagaaagaaatgaggaattgagagtagagaaatacgaaggaagaggaaaataatttttttagtgttatataggaatagagttcggatttgaatttaggtttttttgtttacgtgtttttttttttgtattttttttttatagatttttttgttgggggtttttcgttgattgtaattcgaatttatataaattttaagtagtttgatatttagcgaagtataaaaatattttatatttattgtattgatgttttgaggggttgaaatagaattttgaaatttttttttatttttaattaaaaaaagatttaggttaatttcgggtttttagttttatttaattgagacggtttttaatcgttgttgtatttttattgttataagtgtatcgtattaatttattttttttgtaacgtatttcggtttttgttttatttgttgaagagaaaatatttgtagaaatttttcggtttttttttaagagttgaaatttaagttgtagtaaggaatgtagtgtagggaatggggttggttattggtgaaattaggagattggtaaaatttgtttttagtatgtttttgataattgtttttttatattaatagttgttttatataagtagttagtgtaattgtgtttttttgtgtgtatttaggaggattttaggtattatatattttggtttttatatttttttttataatggaattaataattttgtttttaatttttgtttgttttttatttttagtaagtttttacgcgggggtttttttaataaattgtttttagttttaatttataaggattatatttttgtgtgagaggggttttggaagatttgggtttaagttttttttttgttatgttttaatttggtaaataatttaaattttttgagtttggattttttgtaaaagttttaggaggttgttaggattaaatggtttaattgaagtataaatgttttgtaaattgtgaaatgttatatttatattatatatattcggttagagtatttatttgttagtgatttgatttgtttgtttatttatttattaatgggttatttgttggatgaatgttatgtattaggtttggttttattgtgcgtgatatcgaaatgaataaggtaaagtttaaattttttaaaagtttatatatatgatattatagtaagtgttgatttagggttataaataggttgttgttttttttttttatgggattaggagattttttaaagagagaatgattttgaagtgaatattaaagaataaaagttttttaaatcgagaatagtgattaagttaaatgttgataaaaataagaagtaatagtaatttttattgattgttagtggggatgtaaaatggtatagcgatagttataaaattaaatatatttttattatagaatttagtaattagggtttttgatatttattaaagatgttgaaaattgatgtttatataaatatttgtatatagatgtttatagtagttttatttataattgttaaaattcggaagtaattaagatattttttaataggtaaattgataaattgtgatatttagataaggggatattatttagagttaagaagaaatgagttattaagttatgagaaaatatggaggaaatttaaatgtatattgttaagtgaaagaagtaaatttgaaaaggatgtatattgtataattttaatatatgttagaaaaggtaaaattatggagatattgataagattagtagttattaagggagaatggggtaggggagataagtagatggaatatggaggatttttagggtggtgtatgtattttgtatgatgttataatggtaaatatatgttattatttatttgtttaaatttataaaatgtataatataaagggtgatttttaatgtaaattatggattttgggtgataatgatatatcggtgtaggtttatggattgtagtaaatgtatatttttaatagggtatgttgataatgggggatgttatgtatatgattggataaatgtatatgggatagttttgtgttttattttgttgtgaattaaaaagtgtttttaaaaatgttttaaaaaaaataaaaggtttattaggtttgggaatggtaatggggtcgggagagtattataggtagaaggaatagtttgggagaaagtggttatggggtaaaatagattggggtttgtagaaaatatttgtagggaaattaggaagtagaggtagagatgttgggaagcgggtggatagtgagatgtggggaataatagggtgaagtaataatagataattgtttatatttagaggtgggaggaagttattgattaaggtgaaattaaggtttgattgattttaataataataataatgtttaataataataatgatagttattttttaattaaatagtatgtgtaggatacggtgtttatggtttatatttattattttattgaaagtataaagaaagtaagattttgtgaaagaggtatgatttaattggtgtgggaattgaggttaaaagggtttttgtgatttgttcgtatagatagtgggttttatagtttgagttaaaggtaagtttgtttgtttaaagtttttgtttttaatttttttattgtttatattggtattttaggaatatttggatagtttggagaaggagttagtaaagggaggggttgtgtaagtagtagattgtaattatttttgagggtaaaaaaattttttggaattgtaaaaacggagttattttgttggtaggattgtaggtattaattttaagtttttttaaggtgattgatattttggggtaagagggagagtttttaagaagtaagtttatgtgggtaattttttgttgtatttgaagaagaggtaggaatttgtgaaggagttgggttttttggtttttgttagttaataatttttatattgggtttagtgaattttgtagagatatttaatatgttcgattaatgttatggaagttgttttttttgataatttattataggtagaattttaacgtgaaaaggttataaaataatttaaagtttttattttattttttttttaagtatgttttggtagtattttaagttttttgaaggaaatattatagaattataagttttgtggtttgaaatgtttttgagatttttatttttttttttaattttgtgaatgttattgttagaattttttaattttattttgcgattttattgttataatttttgtttgttggaattgttttttttttatgtacgtatttttttgtgttatttatttttggttaattttggtaggttgatggtttttaagtgttggtttaaaatttggtgttaaaatttgaagagtaatattttattttgatgttatgttttgattgttttttgttggtggttaaaatgtttttttttttataaaattttggtaacggtgattgtagtgtttgttttgttaaataattttttttagaattagaaaatgttgataattttatattggtttaaaaaattggttttataaatttgatttggttatggggttaaaaaggttgatgttgatgttatggattaaatagagtaagtttgttttatattttatatttgagtatagattattattatatttttaatttattattttttgtaatattttggtaatgttttgtttatagtaggttattattaaatatgtatgtaaatgagtttttaggtaattaaaaatatagagtattttttttatattttggtttgtttgatgtattgtttgatgtatgtatttaataagtatatttaatgtgatataaattttatcgttaaggtattagagttgagtatgttttgtggttaagaggttaggttttggaattagattgtttgggtgtgagtttaggttttttttttaattagttgtgtaattttaaataggttatttagtaatatagtgttttatttattttgtttgtaaagtaggtgtgattaaaaaaataaaataaaataaaaaaaattattttatagagttgttgtgaatttaaagattttagagtagtgtttgatatatggtatgtgtttagtggttgttaatttttattattaaagtttatatatcggaaatggtgtagtagggagtttacgttgatttggtttagaagatttgggtgtaagtttttgttttgttatttattagttgagtaaatttggaagagttatttaattttttagtataaatttaattagaattaatggtataattttagagatggttaacgtgtatgggatggagaagttgaaaaagttgttatgaaatggaattttaaaggatgagtagggtattgttatgaaatagatagtaagatggggtagtaaagaggtgaaattatttgtggaaaatatttggagttatttatttttttttttttgaaatgttttttgaggaattagtgagattaattattttttttgggatggaagagattgaaattattatagttaatagagtatttttttttatagagatatttagaaatagaattttttttttttttaagaaatttgttattatgatgaagatttttttattataagggagttgatgaaaagatgaaattaaagtttaatatggagttaagagaataaaaattgttagaatgatgttgtttagggtttggaattgttattaaatatatttaagataggattaatttggaaagtgtttttatataatatgggtggaattaaatgtgtatgtgaatatttaatgagataggggttttgggtgttttcggttttttcgattttatttgtttttagagattaggttgttatttggatgttatttgtatttaagatgttatatgtatttttgttgatttttagaagtttgttaataatgttttttatttgttttcgtgtagagaagaaataagtattggagtattaaagttatgggagagaattgattatgttgggaatagggtaagaagtttggggttttatttttttatgtgtttatggggtttttgtaagttattgtaggggttacgttaaaaaagatattaggtatgagtagaggatggttaatggataatttgattgagtattttttttagtggaataaagttatttgtatatttaggtggtggttgtggtatttgagattgaatgtgtggtgttagaaattgggaagtggaggtaggtttataattttagtattgggtattaggtaagtattttaattagagtattttggaaatttatttatttatttatatttttatttgtttatgtagtgaatttgtatggaagggttgttttttgtattagaggttgtggttaaaatgagaaagtagatttgtttttgttttagaggagtttaattagttgataaatgtgttgtttatttattgtgttttaaattttggtaatataaaagtgagtaagatagtatgatttttatttttaaggagtttatagtgtaggagaaagagtaatattagttaaattgaatatagtatgagagtgttagattatgtgtgtgtgtttatatatatgtatttatatgtattttttaaaataataataatgtatatttattgagtatttattattgtaataaaatattttatatgtattgttttaaataattttttttgttgttttttgaagtaggtagtatgtagttattatttagattttattaattaagaaatagattaagagatgttaaattaattatttagggaaataaaaagaattatagtagagtgggaaatagattgagtttttttgattttcgtttttttttttgagtttttttttatttgtattatttttttaatatgttgtaggggttttggaggaaggagtaattaaaagggttgtgattgaggatggggaagcgattgagatagaggagggaaaggtgtagattgggtatattaggtttagtaagagaatattaggaggatatgttggggaagagtattttaggttttgagaataatatatgtaaatacgtggaggtttgaataattatatattgttgagtggcgtaatgaaatttgagtaggtgggttggggttaattaaggagttgaggtgggagagggatattatatattatattttttttgtatagtatagttttaggtagatagtgtattttaaattttagtatttgttaaggattatttatttattggggattgagtgagggaggaatgatttattgatttgattaggaaatattttatagagatggagataaagaatgaggaagaaggtattaaatgtagaaagatgggtttttagatataagaatttttttgggaggtaggaatggtttttaaatagggtattggtgtcgtgtaggaggagtaaatacgttgaagaagttagatttataaagtgaaatgtaagtgtagtgaaagtagtaaatttaagaggtgagcgggggagaagtgttgtatggtgttaggcggggaatggagtagttgttaagtttaaggtttatgatttgaagaacgtgatttatataattcgtttttttttattgatgtgtttttaatcggttgtttttttaaaatttattttttattgattttatattttatttttcgtaggtagtgcggagtaatttgtttgtatttgtattttatatagttgtgggtttttttttcgttatatttggtgggttatattttggatatagtatagtagttaaagtattattttgttgaatgatttggaggaagtttagtttgatattatgttttaataataatggaagtattatagtgtatgttttttatgttgtaggtattttgttaacggttttatatgtgttatttgatttgatttaggtattcgtttaatgtattatatttatttttattttataaatttataaattgaggtaaagagaaataaagtaatttgttaaggttgaatagttttttaatattataatagaatatttaggatttgaattgggggatgttttagttttagagtttgtgtttaatttttttagtatattgtttgtttgatgttttgtatggattttttagtataagtgtaaggatagtttggggtagttttgaaatagtaattatgttttaagaatagggatgaaagtaatatttggttattataaatgttattgagttgattttgtttataaatcgttttttatttacggggtagttttataggttttatatatttaagattaggtatacggtgtttagaggtttgttaggtgatgatgtaaatgtttgaaggtttttattttgtggagatataaatggaggtttaggtagatgaggtaatagttagaaggtaattgttgtatttggtaggtttgggatgaaaatttaggttaatttggtttaaaattttttgtttttatatgatattttttgtaggttattttttttttttgtgtttttgtttttttgtttgtgaaataaaggaattggattagattaatgtttcggaaatgttagttttttaggtattattttaatagtttttattgtttttttaatttatttgtattatttaatatttttttttgaattagtttattttttaaatttatatatttttataggaaattttatattattataattgaaaaaagtattatttatattatatagagggtaattgtatgagtaaatatagtgaaaattaaaaaataatataattatttttgtttatattttagtatgtatatttggttatatttttgtttatttaagtttttgatttttataattgatttttttgtgttaaaaaataatataggttgggtgcggtggtttatgtttgtaattttagtattttgggtgatcgaggggggtagattatttgaggttaggagttcgagagtagtttggttaatatggtaaaatttcgtttttattaaagatataaaaaaaaattagttgagtgtggtggcgtgtgtttatagttttagttatttgggaggttgagttagtagaatcgtttgaatttgggaggtagaggttgtagtgagtcgagattacgttattgtattttaatatacgtgatagagtgagatttcgttttaataataataataataatatagatgtttttggatttataatggcgttatttattaataaatttattataagttaaaaatgtatttaatatatttaatttattaaatatcgtagtttagtttagtttatttttaatatgtttagaatatttatttttgtttatagttgggtaaaattatttggtattatcgtatattgtagagtgttagttgtttatttttataaaatcgtggttgattgggagttgcggtttattgttgttgttgttgggtgttgtaggagagtgttttgttttttattgaatgtgtattttttatatattattttaaatttttaaagttaaattattgtaagttggggattattcgtatttataaatgttagagaaaagtttaagatatcgtgatatttaaatgaatatttttttttgatataattaggattaagagagaattggaaagggattttttttttttattatgtgggttaaagttacgttatgaaaaatcgagtttttatttaaagttatgtttgttgtggttagtgtaggtagttgttatttttttgaaatgttggatgtggggatttgtggtgtttttttaatttttgtattttttaattttaataattttttaggggtttttatgtatttagagatttagtttgatagtagtagatttgttgagagatgaagtgaaaggtatgagtttagattgtgatatggaagaaggaagtttaaagagagtcgttgttgtgtttggttattttaatttttagaagagagttagggattggagttgataaaatatttagtgttggatatttgtgtttagggttatgttttttttttcgagtttttttatttttatttttttgttgttaatgtttattagttttttattttgtggatttttatacgatttttatttatttgttttttttttgtttttttaaggattgatatatttaaaaagttgtgtttaaggaagatttgttttgtgatagttttttaggaggaatgaatatgaattataagtttattttttttattataggttgggtatttggtattttttatttttcgttttttaataatttaatgacgtaaaaatgagttagggttttattttatatattagaaaatgaggtttggagagtattagtgatttaattgagttttacgatttttgagttttatatagaatgggattgtttttaaattttgtatttttttttagtagttatgatatattgaagattagttggattggggaagaggaggtttttggatggggtagtttttggatttgtttttgtattttgggggtgggatttattgttatattttttgttttagtttttttttttttttttagaggttggaatatgatgttaatgagattttatttatggattttagttttttgggggttaattaatttaattttattttagttgtcgggaattttagatttaaatttagattaattagtttattttaggtgtttggtaatatttgtttttttatttattttaattattttttgttttatttttatttttaattgttttgatttatattttatttaattttgtaatattattttaattgtgttttgggggtaggtggggtatgaattttaaataaataagtaaaattattttaggtgttaattttggagaggaagaatagtttatggatttttttttagatggaagttgaggttatttttgaaatagtggtttgggaaggtgaatttttattgaaatatagggggagtttggggaggggtagggagagggaatgagtgtgggagtagttgggtagataaattttgtttatgtgggtgagtgtagtttaatagtggaataagattgtttatgagaatttattggggagttagaatttatttaggattttggggttatgtagaatggtttatattttaaaggaggaggttgtaaagaaagttatatttgttgtgttgtagtgggagagttttagatttgaatttttttttttaaaataatgagtgagttgtgtgacggtgggtgaattatttaatttttttgagtttgtttttttatttgtaaaatagaagaaataatttttgtagaaaattaaaaagatagtaaagtgtagtgtttggtatttgttaggggataagtgatgaaatttatttattttaaagatatgtatttatttatatttaaagatttgtatttatatttatgtatttattttaaaggtatgtattgagtttatattatgtgttaggtattgttttaggaattgatgatatacggttgatttaaatagataaaagttttgatttgattttttgatgttgatattttagttgagaagattaataataaataattaaatgaaatatataatacgaagtagttgtaagttttgtagggagaaaagaaagtatgttaatgtttagtttagaagttggtaaattgcgatttgtgggttaaatttggttcgtttttagtttttgtaaatgaagttttattggaatatagttatgtttatttgtttattgattgtttatggttattttttggttatagtgatagagttgagtaattgagatagagatattgtggtttataaagtttaaaatatttattatttggatttttatagaaaatttattttatttttggtttagaagaaaataggattagtaggagtagtagtttaggtgaaaagagaggttaaggttttattttttttttttatttagtgttttattttttttttttttattttattttttttttattgttttttttttttttttttttttttttttttttttttttttttttttttttatttttttgtgtttttgttgttgtttttttttgttttttgttttttttgagacggagtttttttgtgtcgttagggttggagtgcggtggtgtgatttcggtttattgtaagtttcgttttttgggttcgtattatttttttgttttagttttcggagtataggcgttcgttattacgttcggttaatttttttttttttttttttttttttttttgtatttttagtagagatggggttttattatgttagttaggatggtttcgattttttgatttcgtgattcgttcgtttcggttttttaaagtgttgggattataggcgtgagttatcgcgttcgtttttatttcgtttgttttttgatttgaaagattttttttattttagttttttttatttatggagagaagattgaattttagaaatcggaagtgattgttagagtaaggtgtttcgggagaggtcgtgaggggaaaaatatttattattgttgtttttttttttgtattttttaataagtatttagtatattgttaggggttaagagtagataagagatataaaaaataggaatagtatttagtatagtgtttgggacgtaatgtatgatgtatggttaatgaagtttagttggtttaaagaaaaaaaaaaaaaagtttaatttaattgtagaggtaaaaaaaaaaagaaataaaaataaaaataaaaattttataatttgaatattagaaattaattagagttttagagattggagattggtgttttttaaggaagtagtagtattggtttagatatttttttttgtaatttaatatttttttttgtattatagttatttttgagtttattttaaaaattgttgatttaagttagtatttttattttaaacgtggtggaaattgagttttagagaagagagtaatttgtttaaggttatttgtttagtaagtttagggggagatatggaggagttaggattagaatttaggtattttaggtttttagtgaaatatttttttgattgtagtattttgttaagtaattatggaaatatggtatattttttgaaggataaaagatatttatattttttttaagttataggatttgagaaggggttgatgttattaggaaaaattttttagaagaggtagagtttaggtggaatttgaattaagtttaagaggtagaaataggtagaggaattgttttgtatttgtaaagatagtagtaagttttttaatttgttaaaattggattgattgtggttataggtttaattttggttagaaagtaaaagtaagattagggaattaggttagatgtagttaagggagaattttgggtttttaattaagatgtttggatttgattttgtaagtttatagttataaataggtgtatttgttaatatatggttatgtttttgtatttgatatttatagggttagagtggaagagagaatattggttaatgttttaaataggagagattttatatatttgtatttttttttggtttattttgaaataagtgatttagtagtttaaagattttatttttacgtggaagttttttattgtttttttagattgggatttgtgtttacgatttgttatcgtattttttttttaaagtttatatttggttacgttatttttttgtgtttattgtttggattgtgggtttttgagtttgtattttttgtagaagtggtgatgcgttaaaaattcgttattattgataagatggaattaatgttaggggttgtttatttttttattaaatatttattgagtattttttttcggtaagggtttagaaaggggaggattgagtttaggagttgaattaggaggttggtttagttagatgagagaggacgaaatttgtttagaaatggaattatcgagatggagaagaggttggtttttttttttttttttttattaattttttttttaaagaaaaggtttttttattttattttcgtggaattagatgtttgtttatttagatttatttatttggttgtttttatattgtatttatttaaaagggagttatttttttttatttttatattttttttttttttttttttttttttttttattttgttaagtaaatatattttttttggtttttattttttataatttattttttgtatatagagtagatggttttgaatttttaagggtacgtgtgtgtttttatagatttgttgagagtagattaggaagagttaggttggtagcgttagtttagtgaattgtttttttaaattaatacgattgttttgtttttatttttgtatttgattgtagtatttttgttttttttgttttttagtatatatttttttttttatattttatttttatttttatagtttattttttttattatttttttagcgtgttttttaaaggtttaaatgtttttttattttttatatatattatagcgtgattgttttcggagtaatgagaagtcgaatttgggaagttgattttttgggaaatggtttttatgttaaaaataaaggaaaataaaatttattaaaaataaattaacgtatgtaggaataggagagggtgtttgtagttataaaaattatatgtaggaggaggtatgaagatgtggtttatatttttggttttttgttattaattagttgtgggattttgggtaagttttgatttttttttttataaaataaagtagttgtattttattttttttaaggatcgtttaatttagggtattttagagtatttgaaggaaatattattttgatatttttgaggggttttttttttaatttatatttgatatgtaaatggtgatgttaataatatataataaatgtgtatattaagagatttttatttatatatgttagttttagtaataattatttttttggatattaagtaagttttaggtggtatttaaaagaagaatattttgattgtacgaaattttagtggtttttaaggaaagtttttttttttttttatgggttattaggaataagatgaatattaaattatgttgtgaggttgtattttttgaaggtagaaggttggattggatgatatttttaggttagtgtttatttgaggaaagtgttgataattttatagaaagtagattttagatttagagaagtttgagtatattgtatggtatttgaaaggtgtttattaagtatttgttgaataaattattgatattagataggtgtttattaagtatttgttgaatgaattattgatattggataggtgtttattaagtatttgttgaatgaattattaatattggataggtgtttattaggtttttgttgattaaattattgatattgggtaggtgtttattaagtattttttgaatgaattattgatattggaaaggtatttagtaagtatttgttgaaagaattattgatattggaaaggtatttagtaggtatttgttgagtgagttatcgatagagtgtgttatagaatgtttgagttagaagggtttttagagataatttaaaatttttaattttttgtatagattaattgaggtttgtggatgggatgagttttgatttagattatatgatgaattagaaatttagttgggttttgagtttaggttttttgatttttatattagtgtttgttgtatttattaatttttttggtatttaattacgtaatttggtttaagtagttttaggttaatagtttttaaaggtttttttgggatttttgtaaattatttgagttttttaggggatatttagttggtgtttttttttttttttttgagttggttgtttgtgttcgttttagtcgggagaatattataatttttttttttgttttttagtagtgtatggttattttattatttattttaatagattttgttgagtttttatagtatatttggaagttattttttgtttggaagttagtggcgtttagttaatattttagtaatatttgttttgttaaggtttagataaattaaatttatttatttttttagattcgattttttttgtttggtataatgtttttttatttaaggcgagttaagattgagtatgattttttttttttttttattttttttttttattttttttataaagtgtaagttttttttttattttattagtatagaattatagtttaagataagtattatgatttttggaaggaatataagaaaatatttaagtttatttttttcgttgtataggtgtagagattaagttttagagatttagggatattagttgttttaagttttgtttttatagtagtagtggaggttagaattggggtatttttatttagtttagttaagtgttagttaaatttgatggtatgttttagtttattttttataaataattttgtttttgattttattttgtttttgttgaatttttatggttggggtttgattagggaggagtatgagagtttgtttgggtaattttaggtatattattttaatttttagtttttttgtttgtggggtgatgatttagttttttcgttgtgttaataatacggtgttgtgaaaatcgaatgaggtaatgtattttttaattcgaaggtgttagaaatatgtttgtttttgttggttggtatgattggtttttttttttgagtaggaatttttattagtttaaagttgtgtttattttataatgagtatttggggtattttggtaaggaagtaggtatgatattttgaggtaaaggattttttttaggaaattttttatttatttaattattttttgtgtgttgggttttatttttagtagggaagcggttttttttttagattgtatttagagttgtttttgttagggagtgtatgggttagaaatagattaggtattttttttggagttttataaaaatggattttttgggttaaaggttttttaatttgtaaaatataagttgtttgtttgatttgaggttttagtagattttttagatttgaaggggttttggtatggaaaatggtttgtgttttgaagattaagggtttttttatttaaaagatgtaatatatattttttttttttttttaggtttttaatgaaatattttgtttttttttgatttaaagtttgtaagtttttttttttatgtatagatggattaaggtagattgtatatttatagtttatgagatggaaagaattttagtgaatatttagtgttttttcgtttaggataagttttttttttttattttaaatataggttatttatttttataaatgtattaaaataatacgggagcgttttaagattatagatttttggattttatttttagaatttttaatgaaatttggaggggaaaatttatttttttttatttgaagattagaaatattttaagaatttttttttttttttttttttttgaaataaggttttattttgttatttaggttgaagtgtagtggtacgattttggtttattatagtttttgttttttaggtttaagtgatttttttattttagttttttgagtagttgggattataggcgtgtattattatgtttggttaatttttttgtatttttggtagagatagggttttgttatgttgtttaggttggttttaaatttttgagtttagaaaatttattttttttagttttttaaagttttgggattataggtatgagttattatagtttgttagaaatttattttaaagttagagattgtttgagatttataagttatattagattaaagatatatagtttggggattagagtttttaatttagtagttgatagtttaatgtgaattaagagtttaagttttgaatagatttagtattaaattttaattttggtttttattattaatagtgtgattttgaataagttattttgttttattgatttttagtttttttatttataaagtgggaatattaatattatttagtgtatttgttagttattatcgtaaatttgttatataataatttttttttttttattattttatttaatttattggttttaaatagttggtatttgaagtttatgtattagtggggtagttagggttagttgatttaatttaggtttattgatttaggttgggttgtttttgtttttgtagtttagtggggaaggggggtgttttattttaattttggtttggttgagttatgttagttcgagagtttgttttgtatgttttttattttttttttgaaatattaggtatgtttttgtgatagtagtaggagtatagaggttaagtagaaatttataaggtgttttgtgtataggtttagaattgatatattattatttttgttttatttgattaaagggagttatgaagatgagtttaaatttaaggaaaggggaatagattttatttttttagtagaagggttaaaaagtatatgatagagtgtttaatgatagggaggggtgatgtgttggggttattaaagtaatttattataattattttataggttgttatggagatgaattgaggtaatatttataaaatttttgatatagtttttgttatatagtaagtgtttataatttttttttgttattagtaaattattattaatattgtaaggattaaaaatggtagttagaatggttatatatagagtttttgaatttagtaatatagatgggaaaatagattttcggagtggtgacgtagttttttgaaaattatatatatgggattggttgggtttttagaaattagagagtgtatagttttttatttagagtttgaaggtaataggaaggattttggttttagtttattaggaggtttgtttttgtaataataggaaggtattttttagagtttagtaatggttttagttgattttgttgatttttttttttagtttagatagtggtttttattttttagtgtataatatttatcggagaatttattaaaagtgtagatttttatatattttttattagagagatttatgattcggtaagtttggtgaagggtttaagaggttgaatatttattaagtatttttggcgattttgattaaagtggtttgtggaatatttttcgtgaaattttagatagtgttaaggggatggaaatagtgaattttttgtatttttgtatttttggttgatttttacgttagtaaagttggaggttttgggtagaatggtagttgtgtaattaatggaggtttagaaaaagttaggaagagagagtgttaaaggattaagatagattttattatttatatatttataaagaaatatttatgatagtaggaatatttttaaattagtattatagaaggagttaattaaattttattggaatttttcgatgttatatatggatgtagatgttgttgataaattgttgttatttttttgggttttgtgtgttgttagtagtagcgaattaaattgaaattgttttaaggtaagaaaaatttaaaatttaaaataataaaattatgtgattgttttatgtaattaaattttgtgagtagagttgggtagtaggttgttttagggtttttttagttttattttagaataagttttggttttgtttttttaaggtttttttttatagtgataaaatgtttgttaattttttagttttttttttttttaggtttaggtttggtagtaaagttttgtttttttggttttgggggttttttatattttatttttttaagtcgaattatggattgattttgaaattatttattatattataagaattgaatgtgggaaagtaatagaattttaagtaaaaattgatgattgttttttgttgttgttgttgttttgtttttttgagatggatttttattttgttatttaaattggagagtagtggtataatttcggttcgttgtagtttttatttgttgggtttaagtaatttttttgttttagttttttaagaatttgggattatagttgtatattattatgtttggttgattttttgtatttttagtagagatggggttttattatgttggttaggttggttttgaatttttgaagtcgtgattttttcgttttagttttttaaagtgttgggattataggtgtgagttattgtatttagttttgatgattgttaagaagagaaaataggtttttgagaggtaaatatgaaaggttaattatatttattgtatgttagtttttatgttaaatgtaaggatataggattgtgttagaatttgggttttatttttaggatgtttattatttagttttagaaatataaatgttaattattgaatgagatagaaatataaagaagaatggataatgttagtaaagttttaaatatgggagggtttatttttattggtgtttaaataaaggtttttagagaagatattggagatgaattgttaagggatagtaagaatttgttttttagtatttagagatatggaggtattttagagaatttgtaaaattttgaggtaattgtaagaagtttggtatgttggagggaagagtatgggggagtggatggtggtgaggtgagtttggaaagtaggtagggtagaaataaaatgttttgttaaagaatttggattgtattttttaggtgatgaggaggtaaagattagttttaatagggaaattagatggttttggtttagtaaaaggtagagaaagaaaatggtgagtatttttagtgttttttcgaattttgagatatgtggaaaaggttaaaaaaaattggtattttttgtaatatgtttatattttttattggtggattatggatgtgtttttgtgtgggaaataaattgttttttattaaagtgaagaattatgagaaagtataagattgaaagtttagttcggggtttatggtaggagtttagatttaagtttattttttatttaagtagaatattaaataggtattattggttagtggatttagaaattagattatatggatttggattttgttgttgttttatagtagttttgagattatgggttttagaaagttttaaaattttttggttttttttttatttatgaaataggaatgataattatatttttagatgtttgttttgagggtttagtgaattatgtttgttttattaaaataatttattggtgttatttttttgattgtttatttttttattattgaaatgaagaatataaatttttgttttgtgtatgttaaaagtggttgagagattaaatgggagtttagttttttggtagtatgaagttttattggaatgtaaggatggtgtgaggagaattttgagagagtgggaagaggtagagtgtttaattttaatattgaatttgtgattgtcggtttaggtatatttagtatttgtttaaatatttatgtgttttttgtttttttttttggattttatgattgttatagataagtgatagttgtggttgtatttttagtttattatttaaaaggtattttataaaaggatgataatattgtagaagaattagttgaattatggtagtttttatataaatgaatttattaagaattttttatttgattttagtagggatttgttggaaatattaggttaagggttagaatttttgatgagtaaatattggaatttggatttaaatataaaatttaagtgttttatttatttgttttattgaatattaagaataattaattttagggaagaatttaaagttattaatttattagaataatttgtttttttattgagtcgttgtattttgagtatttgtgtagtgtttgtttttatttttggtatttatttttgtttttaagtttgtttttaagttttttaatatgtttttgtgggggtagtaaattttttttattttttatattttttatttattttagtggtgggtttttatgattttatgtttttgtttatattgtttttatgatttggaaaatttttttttgggtttttttgtttgtttgtttttgttttgtttttttagttggtatatttttgtttgaattatttttagtttttttgagaagtttttttgatttttaagttaaattttagtttttttgagaagtatttttgaattggttttgtttgagttatttttttttttttttgttttaataatattgtttaggtttttgatatttaatttattgttttgtaatttgggttttatagatttattttcgttattagtttatggttttttaaagttatggatattttttatttaattattaagtgtttggtttagagtttggttattttattttagattttattttatttttttaataagtgttaattatttttttgttttatattttattatttaattttaggtttattttagaattaaatatattaaagtttttttataaagaaaataaaaaattttttattgatttttggtttttttttttggtagggagaaaggagagttatttgtttttttgttttttttattttagttaagtattgtatattttgtgtttttattgatttatattttatttatgttttaattttttttaatgaattttttgtttttattatgttgttgataattgttagttatttttgtatttttaattttaatagatattttgtatttttattttgttttagtattttgtagtttttgaaatttgagatttttttttttttatatatttttgtttttttggttttgttgttattatttttttataatttttttttatttatcgtattatttttttttagtttattttatgatatttttttttttttatgttgattaaaaatgggtattgtttattatttatttgtattatttttgatttatgagtttattgagtggttttatttatttttgtagttttaattattattggtttatagtgatttataaatatttatttttagttttggtttttttttttttttttttttttttttaaggattttgtagtttattagaaattttaatttgaatgttaatggatattttaaatgtaatagatttaagagggaatttgttattatttatttaaaatttattttttttttattattttttattgttatgaatagtattagtattaatttggttattaaaatagattaagagttattgtatatatttttttttttttattttatttatttagttattaaattttgttaattttgttttttatttttttttttttatttaatataagatgttttgtttagattatgtataatttatagtgtttttaattgtttttttattttattttaaatttttttattaatttttgtagttggagtaatttatttaaaatgaaattttgatataaagttattgtgtttagaaggtttttatggttttttgtgattttatggagtgaattttagtttttaatttgtatagtttatttatttaataaatattgatttagtatttatttaataattagttttagatgttggatatatataggaggggaaataggaattttggttttttatagggaggggaataatatatattggggtttgtttgttgaaggtattgtaggagagagtattaggaaaaatagttaatgcgtgttgggtttaatatttaggtgatgagttgataagtatagttaattattatggtaaatgtttatttatataataaatttgaatattttgtatatgtattttagtattaaaataaaataaaaaagaattttggtttttaagaaattattagttgttggtaatgatatggttatgtaataagtgattttattgaggttttgttttattttttgttattttttgttttaaaatttttattgtagtaattgggaaatgtttgtagattttatatttataatatatttttttatgttattttatatgttttttttggtttgaaatgtaggttaaattttttattattttataaatgtttttttgttttttaaggttttatttagatgttatttttaggaagtatttttagagattttagtttaggggttcgtgttttatagaattttggacgtattttgtttttgttttgttattatattatattgaaattatttatttttatgtttatttcgtattttggattgtgagagttaattaaaatagaggattaagaaatatttattgaattgtagtaaattggtttataataaatattttaaaatatttattttatttttttttttgaaagattttttgtatagattgttgataatttggggagaaagttttaaaggtagtttttttgaatttagatttttatatttttaaatgtgggtttaaatgaaatatttaaaaagaaaaaaagtgttatatataatttaggtttatattgttaataaaatataataggattatagaaaaaaattataaaaataattattttatatattttaatttttatttagttttttacgaatttttttagatttattatttttaggagttttatgttttaagatgatttattagaaattttttttattaatatttttatagttgatttgtggtagtttatattggttaaaataagaaaattataattagggatgatgtggttttttagtttattgttttaaaattttgagttatagtatttagaattggtttaggtttaagtttaattttgttatttttaggtattataatattggaaaaataattagatattttaaaagggttttagttttattatttgtaaaaattaaaataatgtaatttaatgttttatgggattgttttgtggatttaatgttattgggtatgagagtttgatatagtatttagtaagtaatatatgtttaataattttttatttatttttattaataaatttagttatgaattgtttattataaagttgggaaatagggatgggtattgtaaggagagggaatagtttaaataaggtattgaggtatggagatttatagtgtgtttagttggtgtaattggggagagaatttggagaataagatgagttgaggatggggtgtggaagtatggaagtaggaaaaggatttagtttattgttgaaggtaagattaaggggtaaaataattaatagggaatggttggatttgttagattaggtgagtgttatggttgtatttgtattttgatagattattttggtaataagggtttaggatggaggtggtagatagatatgaagtaagacgattagtaggaagatggttgtgataatttaagtgagagttagttatgttttaaatggaatgataggtgttaaacgaggataggtttagaaaaaagaagtgtgtaaggtaaagggaagagtgtaagattgttttgaggtttagagagaagggagaagaataagattggtaaaggaagtagatggatgtgaaagtaaagtaaattgataggatgtggaaatggttgtggtagtagtggtaatggtcgaatagggtggaggaaaaaggaaaagttttaagttttttataggtatgatttgggagattgtatggtttatttggatggggaatattgggagataggaaagtttgagagggtgataatgagtttggttggggatattttgagtttgagaagtttgtgtgattttttagagatgttgattatgtggttaaaaataataatgtaaaatatataaattataatgaatatttattttagagtttttttttttttttttttttttttttttttttttttttttttttttttttttttttttttttttttttttttttgatagagttttatttttgttgtttaggttggagtgtaatggcgtgattttagtttattataattttcgtttttttggtttaagtaatttttttgttttagtttttcgagtagttgggattataggtatgtattattatagttagttaatttttgtatttttagtagagatggggtttttttatgttggttaggttggtttcgagtttttaattttaggtgatttgtttatttcggttttttaaagtgttgggattatagatatgagttattgtgttcggttattttaaggttttttagaatgtttttgtaagatatatatgtagtaattagtagaaatttttggtagtatttttttttatgaatgtatgtatataaattatttatatatattaattttattagttaatattttaattttttagtgtttaagatttatttagagtaagggttagtattaatgatagtagatgtaaatttatattttagtttttatgattattttgaattttttaatttttgataaatttgattaaattttatttttgattgagtattgtagggtggttggttttttattatttttttgtttgtgttgttttgaattatttttattattgttaattaaaagtttttttttaatagtattttgaagttatttgtttattttagttaaagttagatgatagaattttaaattttatattattaggtatcgataaaaatattaagttattataatattttaaaggaaaaatagaatttattgtgtagtagggtttttgttttttattttatgattattggtgatttgtgattggtatgtgggatgagttttgaagataggtagtaaataagtatattagaaattttaagaatttttttttttttgttttgtatattttgattagtaaatttttattggaattaattggacgtttgtattgagttgggtattaaggtgttttaatttatgaaattttttttttggttaaataggatttatagggtaagattagaaagaaataaaagtaaaaattatttgtttttttttatttattttttagatttaatttttggattaggttttttttgatatttggatgaaagttaaggaaagattataatttttttaggtgaaaatttggggggtttatttttattttttatatatagtttttgtttagtaattaatttgtttagtttagtatattataataaatattttatttaaagtggaaattttattttttttttagatttttttttttttttaagttataattttattatgttttttttattttgttaattttgatttttgatttttttaaggtataaagtttggttaataatggagaagtgagaaggtagaaggatttttttttgatgagtattttttgatgatttagtattagtgttttgtagttttggtagatgtttaatgttaatttttttttattggtagtatttttttgggggtgtttttggagtttttttttttttttgggattttttatttgtgatttttttgatgtaggaaaatgtatttttagttgtttgtttgttatttattttttggatttttggtatatggtagggagattattttagttttttgtttttggtattatttttttttttgggttaggattgaaagtaattttatttagtttttttttgtaggtggtttatttttgatttatgtggaggggatatattttttttatttatgaattaggtagttgttttttaaattgtagtttttgttttgttgttgggttttagtttgtttttttttagatttttttttttggaatttttgtttgagatttttttgatgtgagttagatattaattttttatgtttttttaagttttaggagatttttgttatgttttttgagttgttttgtggaagtttgaggtgaggggtttttatattttattttgtttatgagaagtttagagggtagaaaggagggtttagtattgttagaggttatttaaattttatttttagttttggtattttattttttatgttgtgatgtgggtaagaagttaagaatttttaaaaagtgtattttggttgtttgtttttataagttttatatgatggtcgtgtatttgtgtttggaatatggtagttgtagttttggggtttagttgaaattaagataaatagttatattttaaaattatgtttaatttggatttgaattttaagagatgtgtatttttttgttattgtttatattttatagatgaggaaattgaggtatagagggggttaataatatgtttaaggttatttagttttgaaggtttgtattattggggagaagttttatttggagaagtagatttgagagttaagtttagatgagattatttagttgatttaggtttaagaggtaagtattgtgggttaattttttagatgcgattattagtttagttttttaggtatttgggcggagggagggaggaggtatttttttttatttttggtttagaatatgggttatggtttagtaatttatgtagaaagttttagaggatgagtttggtaatagcgttgttggaaggttatttttttattttttttttttgagtgtgtgtttcggatgtaaataatttataatagtaataattagagaatgtattttgtgtgggatgaattcgatttttttaataatattgtaggtttatatatagtatagtttagttaagggttttacgtgtttattacgttatagttagtgttggcggttttgggtagattagagttttgtgtagtaatgggtttgtgatttattgaaggtcgtaggaggttaagggtagtatttagaatagaattagttttttttttataagttttaaattttagtggtaggaaattttttttgtgaattttttggaagaataatagttttgaaatgtatagtagtagatatttaagattgttgttagggtatggggtttgggagatgtggtttttgaatatggaaatgtatattttcggtgtatttattgttaatttgttgattttggaggtaagaggagagtggtttaatttaatggttttaagggagagtaagttgggttttacgttgttgataaaaatgtggagatggatgaatgattttttggagtagtgttatagagtatgagggtttattttgattttcgttgtttaatagaagtagaatattagttatatgtgtaattttaaagtttttagtagttattttaattttttattttatttagtattttttagattataatattttaatatgtaattaatataaaatattagtaagttatttaaaattttattggttaggtatggtgatttatatttttaattttagtattttgggaggttaaggggggaggatggtttgagtttttttaaaataataaaattagtttttataaaaaataataaagttagttaggtatggtggtacgtgtttgtagttttagttagtggggaggttgatgtaggaggatcgttgatgcggtgagttggatttgtgttacggtattttagtttgggaaatagagtgagattttgttttaaaaaattaaaaaataaataaataaaaaaaataaataaattttattatttttgttaagtttttgaaatgttggtgtgtatttttatgaatagtatatttttatttggattagttatatcgaaagtttttgatagatatatgtgattaggggtttttaaattgggtagtatagtttttagttttaaatttgttgtttgttagttttgtggtatgaggttagttatttcgtttttttgaattttagttttttttttttattatgtataaaatggggattaatggtcgggtgcggtggtttacgtttgtaattttagtattttgggaggtcgaggcgggtggattacgaggtttggagatcgagattattttggttaatacggtgaaattttgtttttattaaaagtattaaaaaattagtcgggtatagtggtaggcgtttgtagttttagttattcgggaagttgaggtaggagaatggcgtgaattcgggaggcggagtttgtagtgagtcgagatagcgttattgtattttagtttgggcgatagagcgagatttcgttttaaaaaaaaaaataaaatggagattataattttttttttttttggtatttttatgggttatatgtgtaaagtaataagtgtagtttttggtatatagtaagtgtttatttaatgtgtgattttttttttaaaatgatttttatagtaattaaagtataagttttttgtgggagatggaaatgtaatttgatttttgattatagtcgagtattgaatttattttgtttttgttttttttttttttttttattgatattgtttttttttgaggtatttgtattatttatttttttattttttttaggtttttgtttggaagtttttttattagagatgttttttttgagtattttcgtatagaaagtagtatttttatttttagttttttgatttgttttgattttgttcggagtatttcgtatttattatacgtagagttagtgtttatttgtttttttttttttttttattaattaaaaataagttttttgagggttttggttgttttgtttattattgaatttttattttttagaagagtatttgatatataatagttgtttagtatggtaatgaatgaatagataaatttattgattatttataatgttttttgattttagtaggtagtatagaaatgaaatttatagtttatttgatgagagggagatagagtgagagatgggcgattagttgttttagggttttggttttttttaagtattttgttatttggtgtgttatttttagtatatattttattatttttttatttttttttatttatttaaggtttttgtaggttgtttgttttgttgaaatttttttttttttatttgtgtttaataaaattgtatatgttatttgaaattttttttaagtattattttttttttttatggggtttttttagtgtttttgttgaaaatagtttttttggtatttattttttcgttggattttatttttttattatagtatttatggtagtatattttatattagaattgtttatatttgggtgtgatttttttattatattttgaatttttggagagtaggatttaattttagttggaatgagatgaggttggggaatgttggaaattgtatagattgtgtaatgggatatttataggttagaattttaagtttgatatttgggaattgtgagtttaagaaagttatttaatgtttttaagttttaaggtgtttatttgttaaattgggtaattgtgtttattttgtggaatatatttttattaataattgttttggattgtatgttttggtaattattaagaaaataaattattttaaagttagtatatagtagatgtttaataaatattaataatgtgatttttatattatttggagtttttagtatagttggtgttaatatggttttatttatataatgggagttattttttgttattataatatatatgggtaatatatgtatttatttttgttttagtttaataaaatatttatttttattaataaagttaaggattttatagaaatttttatttttatttttggtgttttgcggattattgtgatgttttaaattaatagagatatattttgattttttttatgaaatatttatttttatttgaggaaatgtagatggtattataggttttaagaataaagtaggttgaaatatagttatatatgttaagtgtttggttaagataatgtggtagaatgagaagaatttttaatcgagagttagaagataggagtttagtttaatttgttatttaggttatgatttgtaaaaaggagttggattagagtagggttttttaatatttgtattattgatatgtggggtttcgtattttttgttgtgggggttgttttgtgtagtgtaagatgtttagtagtatttttggtttttatttattagatgttagtagtatttttttagttgtgaggattaaagatgttttttggggagtaaaaggtttatatttgggaagtacgagttaaattttttaaattttagttaattttgggattgtaggttgaggttttatttttttgtatatatatatatatatatatatatatatatatatatatattttatatattttttttttatgtatgattttgttttatttttgagagttgtaatgttttgagttttgtttttttgtaaatagtttaatagttaagtatttttttataggtttttattttgtattagtttataatagaagttatgtagaagggttgtgtgggtgatatattgtgattttagtgtgttgtattattattaggattttttaataatcgtttttattttttgtttgttatttgggggttttggtagatagtttggtagtcgtagttgttattgttttgtatttaatatgtacggatttgttttaggttttgaataagattttaggttatagtttttgttagtttatttttttgtttatgtattttttttttttgtttttgataattgagatttgtagtgataagtagatttttgtagcgatttatgataaaatagtgtaatgggtaatagagagaaataattaattgggtaataaattatattttttttttaaattttttttttttttttagttttgttttattttttatatttagttggaaaagtagataaatgaggtgttatatttaattatgtatatagatgggtttatagttgataaattgtttgtgtttttattatatttttatatggaagatataaaaatttgaggttttgagaggggatatgattgtttatagttatgtagttgagcgagagtagttagttttttaaagattatttttagttaaaggtttatagtttaatgaataagatagatatagaaataaatataggtatattttagagatttgtaggttgcgttttagatgattataataaagtaaatattgtaataaattgaattattttaattttttggttttttattgtatattaaatttatgtttatagtattttgtagtttattaagtgtaggatagtagtgtgttttagaaaataatgtatatgtttttattaaaaatattttattattaaaaaaaggttaatgattatttgaagttttagtgagttaaaatttttttgttggtggaaggttttgttttaatgttgttggtttttgattgattagggtggttaggttgttgaagattgggtggtagtggtaattttttaagttagataataatgaggtttgttatattaattgatttttttttttatgaaataattttgtagaatgtgatgtcgtttgatagtattttacgtaaggtagaattgtttttataattagagttagtatttttaaattttgttattgttttattaattaagtttacgtagtattttaaattttttgttgtcgttttaatagtgtttatagtatttttattaagagtagattttattttgagaaattgttttttttgtttatttataaggagtaattcgttattcgtttaagttttattatgaaattgtagtaatttagttatatttttaggttttatttttaattttagttattttgttatttttgttatatttatagtgatttattttattgaagttttgaattttttatgattatttatgaggtttgaaattaattttttttaaatttttgttatcgttgatattttgatttttttttatgaattataaatgtttttaatggtatttagaatggtgatttttttttagaagttttttaatgtgtaatgtttagatttattagaggaatttttttttatggtagttatagtagtataaaatgtattttttttttttttattttattttattttttgagatggaatgttattttgttattaggttggagtgtagtggtgcgattttggttttcggcgattttcgtttttcgggtttaagcgatttttttggtttagttttttaagtagttgggattataggtgcgtattattatgtttagttaatttttgtatttttagtagaggcggggttttattatattggttaggatagtttcgattttttgattttatgaaatgtattttttaataagatttgaaagttaaaattatgttttgatttatgggttgtagaatagatgttgttttagtaggtatgaaaatattattaatttttttgtatatttttgttagagtttttatgtgattagatgtattgttagtgagtaataatattgaaaggaatttttttttttgtatagtagttttggataatggttttaaaatatttagtaaattatgttgtaaataaatgtgttgttatttaggttttagattataagtagagtagatttagtatatttttaagggttttaggatttttggaatggtaggtgagtatttggcgttaatttaaagttatttgttgtattagtttttaacgagagatagtttgttttttgaagttttgaagttaggtattgatttttttttagttatgaaaattatcgatatttttagatataaagttattttgtatatattgaaaataggttgttggtcgggtacggtggtttacgtttgtaattttagtattttgggaggttgaggcgggtagattatttgaggttaggagtttaagattagtttggttaatatggcgaaattttgtttttattaaatatataaaaaatgagatgggtatggtggcgtgtatttgtaattttagttattggggaagttgaggtataagaattgtttgaattcgggaggtggaggttgtagtgagttaagattgtattatcgtattttaggttaggcgatagagtaagattttgtttttaaaataagaaagaaaatagattgtttagggtagttatttttattaataattgaagttcgattttttggataatttgttgtattttttttattagtattagtttttttattttgtatttttatgttatagagatggtttttttttttaaattttaggaagtaatttttgttggttttagattttttttttgtagtatttttattttttttattttttatggaattggagagagttagaattttattttgaattaggttttggtttaagggaatgttgtgattgttttgatttgttatttagatttttaaaattttttttatttaatattaggttgttttgtttttttattatttatgtgtttattggaatagtatatttaatttttttaaaggattttttttttatatttataatgtggttaattggtgtaagagttttagtttttagtttattttgttttttgttatgttttttagtttttgatttaaagtgagagatgtaggatttttttttttatttaaataattataggttattgtaggtttattaattggtttaatttcggtgttattatttttcggggagtaggtaggtttgaggaaagggagagaaagggaatagttagttagtggagtagttagaaaatataggtttatcgataaagtttgttattttatatgggtttagtttatggtgtatttaaataattataataataatattaaagtttgtttattatagattattataatagatataataataataaaaaagtgtgaaatattttgataattattaaaatgtgatattaagatataaagtgagtatatattgttggaaaattggtgttaatagattggttaggttgagggttgttataagttttcgatttgttaaaattttaatatttgtaaattttaataaagtgaagtataataaaatgaagtatgtttgtaagtataatataaggtgataagggttaaaatgtagttatagaaaatgagtaattatagtttagaggagtaaataaataacgtttttttaaattaataaaaaaagaaaatgatttttgaggatatgattttagttggttattgaaggatttaaatagggtttggttaggtagtggggattaggtgaataaaaatattgttatagggaataagttgatattagtatcgatatttattattattatttttattatgatacgtgatatttattgagtatttattgtatgttaggtataagagggagtaattatgtcgtttaattgttattttggttttgagtgtaggtgttattattaattatattttgtagataaggaaattgaatgttaggaaagttaaatatatgatttgaaatattattgtttttaatagatataaagtggatttaaagttgttttttaatatggagtaagagaagttttgttagaataagtagggtggggttatatatagttaagcgagtaagtagattgataaggagggcggattatgaggttaggagttcgagattagtttggttaatatagtgaaatttaatttttatgaaaaatataaaaattagttgggtgtggtggtacgtgattgtagttttagttatttgaggggttgaggtagaagaattatttgaattttggaggcggaggttgtagtgagttgagattgtgttattgttttttagtttgggtgagagagtgagatttcgttttaaataaaataaaattaaataaaaagtgtaaattgtgtttataaaattggtatggttttgtgatttttggtttattttttttataaggtatttttttattaaagttattttttaggtttaagtattttattttcgtagtattattgtgttataagattttttaataaaagaagtatgcgagattttttgataaaatgatcgtttttagttttttttttgaattttgggtaatttttgaggttgagttattaaaagataaattttttggttatgtttttttgggtttgggagatattttattgaacgttgtagaagtgaattgtaagtaagttttatgaatttttcgtttttaaagtatttaatttagatagttatgataatttattataagattttgtgtatttatttgtttatgtaaaagtaaaatgtgtgtttagtggatatatgtttgttgagagaaggaaaaggaatttttgtttattgatatttttttatgagaggtaggttgttagtgaagatagaagagggtatatttatttgaattgtgtttttatgttttttattgggtgtatgagattttgtttttgtattaatttatttatttatttttttaatatattttttttgagtatttatgatgtgttaagtgttaagatataggttcgtaagtttatttttagttttatttttaagaaaattgtatttataatagattaaatagtttgtatatgtttagataatatgtgaatagtaaaatgggaatatgggtttatgatggttatagattttatgtttttaattagaattgtattgggttttataaattttaaagtattttattgatataaggtattattatgaagatgtgttaattatattttttttttttttgtgttttttttttttatttttttttttttttttttttttttttttggttttttttttttttttttttttttttatttttttttttatagg

SEQ ID NO: 514 - DNA, 61020 bp, Artificial Sequence
  chemically treated genomic DNA (Homo sapiens)
tttatagaagaaagaataaaaaagagagagaaaaaaagagaaattaaaagagagagaggagaggggaagaggagtaaaagaaaaagatataggaaaagaaaaaatgtgattaatatatttttataataatattttatattagtagagtgttttaaagtttataaaatttagtatagttttggttaaaaatatagaatttatggttattatgggtttatgtttttattttgttgtttatatattgtttgaatatgtataaattgtttggtttattatggatgtagtttttttggaagtaaaattgagggtgagtttacgagtttgtattttggtatttggtatattatggatgtttaaggaagatgtgttgaaaaaatgaataaatgaattaatgtagaaatagagttttatatatttagtaagagatatagggatataatttaagtgagtgtatttttttttgtttttattaataatttgttttttataaagaggtattaataaataagagtttttttttttttttttagtaggtatgtatttattgagtatatattttgtttttgtatgaatagatgaatgtataaagttttgtgatggattattatgattatttaggttgaatattttagagacgaagagtttatggagtttgtttatagtttatttttgtaacgtttaatggaatgttttttaaatttaaagaaatatggttagagaatttgttttttggtgatttagttttaaaggttgtttagggtttaaaaggaaaattgaaggcggttattttgttagggggtttcgtatgttttttttattagggggttttatggtatagtggtgttgcgagggtgaaatgtttaagtttaaggggtagttttggtagagaggtattttgtggagaggatagattagaaattataaggttatgttaattttgtaaatataatttatattttttgtttagttttgttttgtttgagacggagttttatttttttatttaggttggagggtaatggtataattttagtttattataattttcgtttttagggtttaagtgatttttttgttttagttttttaagtagttgggattatagttacgtgttattatatttagttgatttttgtattttttatagagattggattttattatgttggttaggttggtttcgaatttttgattttatgattcgttttttttgttagtttatttattcgtttaattgtatgtgattttattttatttattttaatagagttttttttattttatattgaaaggtagttttaaatttattttgtatttgttagaaatagtaatattttaggttatgtatttaatttttttgatatttagtttttttatttgtaaaatgtggttaataatagtatttatatttagaattaagatgataattaaacgatataattgtttttttttgtgtttggtatatagtaagtgtttaataaatgttacgtattatgatgaggataatgatgatgaatgtcgatattgatgttaatttattttttatgatagtgtttttgtttatttgatttttattgtttggttaaattttgtttaaattttttaatagttagttgagattatgtttttagaggttattttttttttttattaatttaaaaaagcgttatttgtttatttttttgagttatagttgtttattttttgtaattgtattttagtttttattattttgtattatgtttataggtatattttattttattgtattttattttattgagatttgtaaatattaaagttttaataaatcgaaggtttgtggtagtttttagtttagttagtttgttaatattaattttttaataatgtgtgtttattttgtgttttggtgttatattttgataattattaaaatattttatatttttttattattattgtatttgttatggtggtttgtggtaagtaaattttgatgttattattgtaattatttgggtgtattatgaattggatttatataagatggtaaattttatcgataaatttgtgttttttgattgttttattgattagttattttttttttttttttttttttaggtttgtttatttttcgagaaataataatatcgaaattaagttaattagtaaatttataatgatttataattgtttaagtgaaaggaggagttttatattttttattttaaattaaaagttagaaggtatggtaaaaggtaagataggttggaagttagggtttttgtattagttagttatattgtgaatgtgaaggaaaagttttttaaggaaattaaatgtgttgttttagtgaatatatgaatgataagaaagtaaaatagtttagtgttgaatgaagagagttttagaggtttgggtagtaggttaaaatagttataatatttttttaagttaaagtttaatttagagtaaggttttaattttttttaattttatgaaggatgagagagatgagaatgttgtagaagaaaagtttgaagttagtagaggttgttttttgaggtttaaagaaagaagttatttttgtaatatgaaagtataaggtgaagaagttaatgttgatggagaaggtgtagtaagttatttagaagatcgagttttaattattgatgaagatggttattttaaataatttatttttttttttgttttggagatagggttttgttttgtcgtttagtttggagtgcggtggtgtaattttgatttattgtaatttttatttttcgggtttaagtaatttttatgttttagtttttttagtagttgagattataggtgtacgttattatgtttattttattttttgtatatttagtagaaatagggtttcgttatgttggttaggttggttttgaatttttgattttaagtgatttgttcgttttagttttttaaagtgttgggattataggcgtgagttatcgtgttcggttaataatttatttttaatgtatataaaatagttttatatttgaagatgtcgatgatttttatagttagagagaagttagtgtttgattttaaagttttaaaggatagattgtttttcgttaggggttaatgtagtaggtgattttaagttgacgttaaatgtttatttattattttaaaaattttagggtttttaagagtatgttaaatttattttgtttgtgatttaaagtttggatgatagtatatttgtttataatatagtttattgaatattttaaggttattatttagaattattgtgtagaaaaaaagattttttttaatattattgtttattgataatgtatttagttatataagggttttgatagagatatataaggagattaatggtgtttttatgtttgttgaaataatatttattttgtagtttatagattaaggtatgattttgatttttaagttttattgagaaatatattttatgaggttaagagatcgagattattttggttaatatgatgaaatttcgtttttattaaaaatataaaaattagttgggtatggtggtgcgtatttgtagttttagttatttgggaggttgagttaggagaatcgtttgaattcgggaggcggaggtcgtcgggaattaagatcgtattattgtattttagtttggtgatagagtgatattttattttaaaaaataaaataaaataaagaaaaaagaaatatattttatattgttatagttgttataaaaagggatttttttgatggatttgggtattgtatattggaaaatttttggaaaagagttattattttagatgttattaagaatatttgtgatttatgggaagaagttaaaatattaacggtaataggagtttggaagaagttgattttaaattttatgaatgattatgaggggtttaagattttagtggagtaaattattgtagatgtgatagaaatagtaagataattagaattagaagtagagtttgaggatatgattgaattgttgtaattttatgataaaatttgaacggatgacgagttgttttttatggatgagtaaagaaagtagttttttaagatggagtttatttttgatgaagatgttatgaatattgttgaaacgataataaaggatttagaatattacgtaaatttagttgataaaatagtggtaagatttgagagtattgattttggttgtgaaaatagttttattttacgtaaaatattattaaacggtattatattttataaaattattttatgaaagaaagagttaattgatgtggtaaattttattgttgtttaatttaagaaattgttattgttatttagtttttagtaatttgattattttgattagttagaagttaataatattgaggtaagattttttattagtaaaaagattttaatttattgaaattttagatgattattagtttttttttagtaataaagtgtttttaataaaggtatatatattgttttttgagatatattgttattttatatttaataggttataggatattgtaaatataagtttaatatgtagtgggaggttaaaaaattggggtgatttaatttattgtaatatttgttttattgtggttatttggaacgtaatttataaatttttgagatatgtttgtatttgtttttatgtttgttttgtttattgggttgtaagtttttaattggaaatgatttttagaaaattagttattttcgtttagttgtatgattgtggatagttatgtttttttttaagattttagatttttatgttttttatgtgaaaatgtggtgaggatataaataatttgttaattgtaaatttatttatatatatgattaaatatgatattttatttgtttatttttttagttgaatatgaaagataaagtaaagttgagaaagagaaaaaaatttaaaagagaaatgtgatttattgtttagttggttatttttttttgttgtttattgtattgttttattatgagtcgttataaaaatttgtttgttattgtaagttttagttgttaggggtaaaggagaaaggtatatgagtagaggagtgagttggtaaaagttgtggtttgaggttttgtttagagtttaaaataaattcgtatatgttgagtgtagaatagtaataattacggttgttaaattgtttgttagagtttttaagtggtaagtaggggatgaaggcgattgttgggagattttggtagtgatataatatattgaagttatagtgtgttatttatatagtttttttatatggtttttattgtaaattggtgtagggtgggagtttgtgagagaatatttagttgttagattgtttgtaaagaaataaggtttagaatattgtagtttttaaaagtggaataaggttatatatggaagagaaatgtgtggggtgtgtgtgtgtgtgtgtgtgtgtgtgtgtgtgtgtgtgtgtaggagagtgagattttagtttatagttttagaattagttgaaatttggaagatttaattcgtattttttaagtgtggattttttgttttttagggaatatttttgatttttataattgaggggatgttgttggtatttgatgggtggaggttaggggtgttgttaaatattttatattgtataagatagtttttataataaagaatacgggattttatatgttaatgatgtaaatgttgagaaattttgttttaatttaatttttttttatagattataatttgagtggtaaattgggttagatttttattttttagttttcggttaagagttttttttattttgttatattgttttggttaggtatttggtatgtatggttatgttttaatttgttttgtttttagggtttgtaatattatttatatttttttaagtagagatgaatgttttatggaagaagttagaatatatttttgttgatttagaatattatagtaattcgtagagtattagaaatgaaaatgaaagtttttatagagtttttgattttattaatggaaatggatattttgttgggttggaataaggatgagtatatatgttatttatatatgttatgatggtagggagtgatttttattatgtaaataagattatattagtattaattgtgttggagattttagataatatgagagttatattattggtatttattgagtatttattatatgttggttttaaaatggtttatttttttggtagttgttaaagtatatagtttagagtagttattaataaagatgtattttataaaatgggtatagttatttaatttaataaatgagtattttaggatttggagatattgaataatttttttaagtttataatttttaagtgttagatttgggattttaatttgtgaatattttattatatagtttgtataatttttagtattttttagttttattttattttagttgaaattagattttgttttttagagatttaaaatataatgggggagttatatttaagtgtgaataattttaatatgaaatatgttgttataaatattataataaagaaatgaagtttaacggaggaatggatgttagagagattgtttttagtaaaggtattgagagaattttatagaagagggaggtagtatttgagaagggttttaaatagtatgtatagttttattgagtatagatggggaaaaggaaattttagtagaatagatagtttataaaagttttgggtgggtgggagaaggtaggagagtgatggggtgtgtgttggggatagtatattaggtggtagagtatttagggagaattagggttttgaggtagttgatcgtttattttttattttattttttttttattaaatgaattgtggattttatttttgtattatttgttaaagttaaaaagtattgtggatggttaataaatttatttatttatttattattatattgaataattattatgtgttaggtatttttttagaagatagaaatttaatagtggatagaatagttagggtttttaaagagtttatttttggttagtagggagaggggaggaaataaatgggtattgattttacgtgtggtgagtgcgaagtgtttcgaataaaattaaagtaggttagagggttgagagtggaggtgttgttttttatgcgagggtgtttaggaaaagtatttttgataaaggggtttttaggtagagatttaaagaaagtaaagagatgaatggtgtagatgttttagggaaaagtaatgttagtggaagaaaggaaaagagatagggatagggtgggtttaatgttcggttataattagaagttaggttgtatttttattttttatagggagtttatattttagttgttgtgaaagttattttgaggaagaaattatatattaagtggatatttattatgtgttagaaattgtatttattgttttatatatgtgatttatagaaatattaggagagggaggggttatggtttttattttgtttttttttttgagacggagtttcgttttgtcgtttaggttggagtgtagtggcgttatttcggtttattgtaagtttcgtttttcgggtttacgttatttttttgttttagtttttcgagtagttgggattataggcgtttgttattgtgttcggttaattttttggtatttttagtagagatagggttttatcgtgttagttaagatggtttcgatttttagatttcgtgatttattcgtttcggttttttaaagtgttgggattataggcgtgagttatcgtattcggttattggtttttattttatatatggtgaggaggggaaattgaggtttagaaaggcgaagtaattggttttatattataaagttggtaaatagtagatttagaattggagattgtgttgtttagtttggaagtttttggttatatgtgtttattaagagttttcgatgtggttagtttaaatggaggtgtgttatttataaaaatatatattagtattttaaagatttagtaagaataatggaatttatttattttttttatttatttattttttagttttttgagatagggttttattttattttttaggttggagtgtcgtggtataaatttagtttatcgtattagcgatttttttgtattagtttttttattagttgggattataagtacgtgttattatgtttggttaattttattattttttgtagagattaattttattattttggggaggtttaagttattttttttttttggttttttaaagtgttgggattaaaggtgtgagttattatgtttggttaatagaattttaaatagtttattaatgttttatattgattatatgttggaatattatgatttgggaaatattggatgaaataaaaaattaaggtggttgttagaaattttaaaattatatatgtggttggtattttatttttattgggtagcgggggttaggatgaatttttatattttatgatattgttttagaaggttatttatttatttttatatttttattaatagcgtagaatttaatttatttttttttagagttattgggttgagttattttttttttgtttttaaaattaataaattaataataaatatatcggaaatatatatttttatgtttaagggttatattttttaagttttatgttttagtaatagttttgaatatttattattatgtattttagaattgttgtttttttaaaagatttataaagggaattttttgttattggagtttagagtttgtgaaagagaggttggttttattttgagtgttgtttttgattttttgcgatttttagtgagttataggtttattgttgtatagggttttggtttatttagagtcgttaatattggttgtggcgtggtgagtacgtggggtttttggttgaattgtgttatatataagtttgtagtgttattaagggagtcgggtttattttatatagaatgtattttttaattgttgttattgtaaattatttatattcgaggtatatatttaggaggaggagatgagagaatgattttttagtagcgttgttattaagtttattttttggagttttttgtatggattgttgggttatgatttatattttgggttagaggtagaagggaatgtttttttttttttttcgtttaggtgtttgagaaattgggttgatgatcgtatttgggaagttaatttataatatttgttttttaaatttgagttaattggataattttatttaggtttaatttttaaatttgtttttttagataagatttttttttagtaatgtagatttttaaagttgagtgattttgggtatgttattaattttttttgtgttttagtttttttatttgtaaaatgtgggtagtaatagggggatgtatattttttggggtttagatttaaattaaatataattttaaaatgtaattatttgttttagttttaattgaattttaaaattatagttattatattttaaatataggtgtacgattattatataggatttataaaaataggtaattaaaatgtattttttggggatttttaattttttatttatattatagtatgaaaagtaagatgttaggattaggagtggagtttgagtggtttttgatagtgttgagtttttttttttattttttaaattttttatgggtagaatggggtatagaggttttttattttaagtttttataggataatttaaagagtatggtaaaggttttttggagtttgggagaatatggaggattggtgtttaatttatattagagaaattttaaataaaaattttaaagagagaaatttaaagagaggtaggttgaaatttagtagtagagtaggggttgtaatttgggaagtaattgtttagtttatgggtaaaaggaatgtgttttttttatatagattagaggtgggttatttataagggaaaattgggtgaggttgtttttaattttgatttagagggagaggtgatgttagagataggaaattggaataatttttttgttatgtattaagggtttaaaggataagtgataggtaagtagttaaagatatatttttttatattaaaggaattataagtaagaaattttagagaaaaaggaaaattttaaaaatatttttaaagaaatgttgttagtaagaaaaggttagtattaaatatttgttaaggttgtaaagtattgatgttagattattagaaaatatttattaaggaagaatttttttatttttttatttttttattgttggttaaattttatgttttgaagaagttagaggttaaggttagtaagatggaggaggtatggtaaaattgtaatttggggaaagaggaaaatttggaggaagagtgaagtttttattttaaataaaatatttgttgtaatatattgaattagatagattgattattgagtagagattatgtatggagaatagaggtgaattttttaaatttttatttgaaaaaattatggtttttttttaatttttatttaaatgttagaggaaatttgatttaagagttaagtttaaaaagtgggtgaaaagaagtaagtggtttttgtttttgtttttttttgattttgttttatgaattttgtttagttaaagggaagattttatgaattaaaatattttggtgtttaatttagtataaacgtttaattaattttaatgagaatttattaattagggtatataaggtaaaaaaaaaaaaatttttagaatttttagtgtatttgtttattatttatttttaagatttattttatatattagttataagttattaatggttatgaagtgaagagtagaagttttattgtatagtgggttttgttttttttttggggtattgtgataatttggtgtttttatcggtgtttagtgatatggagtttaggattttattatttgattttaattaaaatgagtaagtggttttaaaatattattaggaagaaatttttaattggtaataatgaaaataatttaagataatataaataagaaaatggtgaagggttagttattttataatgtttaattaaaagtgagatttaattaggtttattaagaattggaagatttaagataattatgaagattaaagtatggatttatatttgttattattaatgttgatttttgttttaagtgaattttgaatattggggaattgagatattagttagtaaagttaatatgtgtaaataatttatatatatatatttataggaaggaatattgttaaaaatttttattgattgttatatgtgtattttataaaaatattttagaaaattttggaatggtcgggtatagtggtttatgtttgtaattttaatattttgggagatcgaggtgggtagattatttgaggttgggagttcgagattagtttgattaatatggagaaattttatttttattaaaaatataaaaattagttggttgtggtggtgtatgtttgtaattttagttattcgggaggttgaggtaagagaattgtttgaattagggaggcgaaagttgtagtgagttgagattacgttattgtattttagtttgggtaataagagtgaaattttgttaaaaggaaagaaagaaagaaagagagagagagagaaagagagaaagagagaaagaggagagaggaaaaaagaaaattttggaatgagtgtttattataatttgtatattttatattattatttttaattatataattaatatttttaggaaattatataggttttttaagtttaaaatatttttaattaaatttattattatttttttaaatttttttgttttttagtattttttatttaagtaaattatataattttttaaattatgtttgtgagaagtttgggatttttttttttttttttattttattcggttattgttattgttgttataattatttttatattttgttaatttattttgtttttatatttatttattttttttgttagttttattttttttttttttttttaaattttagagtaattttatatttttttttttgttttatatattttttttttttaagtttattttcgtttgatatttgttattttatttggaatatgattaatttttatttggattattataattatttttttattggtcgttttgttttatgtttgtttattatttttattttaagtttttgttgttagagtgatttattaaaatatagatgtaattatgatatttatttaatttagtagatttagttattttttattgattgttttattttttagttttgtttttaataataagttgaattttttttttatttttatgtttttatattttatttttaatttattttgttttttagattttttttttaattgtattaattgaatatattgtaaatttttatgttttagtgttttgtttagattgttttttttttttgtaatgtttatttttgttttttaattttataataggtaatttatggttaaatttattagtaagagtgaatgaaagattattgagtatgtattatttgttagatattatgttagatttttatgtttaatagtattaaatttatagaataattttataagatattaaattgtattattttgatttttgtagatgataaagttgaggtttttttaaagtatttgattatttttttagtgttgtagtatttaaaaatggtagaattgaatttaaatttaaattaattttaagtgttatgatttagggttttaaaatagtaagttaagaaattatattatttttaattgtagtttttttattttgattagtgtgaattattataaattaattgtaaaaatgttaataaagagaatttttgataaattattttgaagtatgaaatttttagaaatagtgaatttagagaagttcgtggaaaattgaataaaagttaaaatatgtagaataattatttttgtaatttttttttgtgattttattatattttattaataatataaatttaagttatgtatagtattttttttttttttaaatattttatttggatttatatttagaaatgtgagggtttaaatttagggagattgtttttggagttttttttttaaattattagtagtttatgtaagagattttttaaaaggggaagtgaaataaatattttggagtgtttattgtaggttagtttgttataatttaatagatattttttgattttttattttaattggtttttatagtttagaatgcgagatggatatagaaataggtaattttagtataatgtaataatagagtaaagataggatacgtttagggttttgtggaatacgggtttttaaattagggtttttggaaatgttttttggagatgatatttagatgaggttttagaagatagagagatatttgtgaggtaatgaaaagtttggtttgtattttagattaagagaagtatgtgaaatggtatgaaggagtgtgttgtgagtatggaatttataaatattttttagttgttgtagtgggaattttgaggtagggagtggtagaagatgaagtaaaattttagtgggattatttattatataattatattattattaataattggtagttttttggggattaagatttttttttattttattttagtgttggggtatatgtgtaagatgtttaggtttgttatataggtaaatatttgttatggtgattggttgtatttattaatttattatttaggtattaagtttagtacgtattagttattttttttgatgtttttttttatagtgtttttaataggtaggttttagtgtatgttgtttttttttttgtggaggattaagatttttgtttttttttttatgtatgtttagtatttggaattaattattgggtaggtattgaattaatatttattgaatggatgaattgtataaattgagagttaggatttattttatgggattatagggaattatgggaattttttaaatatagtagttttatgttagagttttattttagatgaattattttaattgtaggggttagtggagagatttaaggtaggatgaggaagtaattgaggatattatagattatatatggtttgaataagatattttgtattagatggaaagaaaaaaatgagaagtaaaattagtaagatttggtgattgggtggatgaagtgagaaaaggaaggtgtatataatgatttttagtttgttttggtaattaggttaatgttggtgttatttatgataataaagaataatggaaaaggaatgggttttgagtaaatgatgataagtttttttttggatttgttgtatttgaggtgtttattgatatttaagttaggatttttagtaggttatagaatttttgagagaaaaaaaaaagaagaagaaaggttagggttagaggtaaatatttgtaaattattatgaattagtggtgattagaattataggagtggatgagattatttagtaaatttatgagttaagagtaatgtaaataaatagtaagtaatgtttatttttagttagtatgaagaggaagagatattataaagtggattgaaaagagatagtacgatggatgaaggggaattatgagagaataatggtaataaagttaggggagtaggggtgtgtaagaagaaaagggttttaagttttaaaggttatagagtgttagaataagataaagatgtaaaatatttgttagaattaagaatatagaggtagttgatagttgttaatagtatgatggaaatagaagatttattgaaagagattaaggtatgaatgggatgtgagttaatggagatatagagtatatagtatttggttaagatggaaaaagtagaagagtaaatggtttttttttttttttattagagagggaagttaagagttaatggaagattttttgttttttttatggaaagattttagtatatttaattttaggatagatttagaattaaataatagaatatgagatagaaagataattagtatttattgagagagtggaatggagtttgggatagggtggttaaattttggattagatatttggtaattaaatagaaagtgtttatgattttagggagttataggttgataacggagataaatttgtaaaatttaaattataaaataatagattgagtattagagatttgaataatgttgttggagtaaaggaaggaagaagtaatttaaatagagttagtttaaaaatattttttaggggagttgagatttggtttgggagttaaaaagattttttaggggagttgagaatggtttaaataaggatgtgttagttgaaaggataaaataaaaataaataaataaaaaaatttaagagaaagttttttaggttatgagagtagtgtgagtaaaagtatggaattataaaaatttattattaaaatgagtaagaaatgtaaagaataagaaaagtttgttgtttttatagaggtatattgaagagtttggaggtagatttggaggtagaaatagatgttaaagatagaaataggtattatataggtgtttaagatatagcgatttaataaagaaatagattgttttggtgagttagtggttttgagtttttttttggggttaattatttttaatatttagtggagtaaatagataaaatatttaagttttgtgtttgaatttaaattttaatatttatttattaaaagttttgatttttggtttgatgtttttagtaggtttttattgaaattaggtgaaaagtttttggtggatttatttgtatagaaattattatggtttagttaatttttttgtaatgttgttatttttttatagagtattttttaaatgatgaattaaaagtatagttatagttgttatttgtttgtgataattatagaatttaagaaagaaggtaggggatatatgagtgtttaagtagatgttggatgtgtttgggtcggtaattataggtttagtgttgagattgagtattttgtttttttttatttttttaaggttttttttatattatttttgtattttagtaaaattttatgttgttaaggaattgagtttttatttgattttttagttatttttaatatatataggataaagatttatattttttattttagtgatgagaaaatgaatagttagagaggtaatattagtaaattattttaataaaataggtataatttattgagtttttaaaataagtatttgaagatgtgattattatttttattttataggtgagaaaaaagttagaaagttttagaattttttgagatttatggttttaaagttattgtgaggtagtagtaagatttaaatttatgtaatttggtttttgaatttattagttagtgatatttatttaatgttttatttggatgagaagtagatttggatttaaatttttgttataggtttcgagttgggtttttagttttatatttttttataattttttattttgatagagaataatttattttttatatagaagtatatttatggtttattagtgagggatgtgaatatattatagagggtgttaattttttttaattttttttatatgttttagaattcgaaaagatattaggagtgtttattattttttttttttgttttttgttaaattagagttatttaatttttttgttaagattgatttttatttttttattatttgaaggatatagtttaaattttttaataaggtattttatttttattttgtttattttttaaatttattttattattatttatttttttatgtttttttttttagtatattaaattttttatagttgttttaaggttttgtaaattttttgaaatgtttttatgtttttaggtattaaagagtaaatttttattgttttttgataatttatttttagtattttttttggaggtttttatttgaatattagtaggagtgaatttttttatatttgggattttgttgatattgtttatttttttttgtgtttttattttatttaatggttgatatttatgtttttgagattgaatgatgagtattttaaaggtaaggtttaggttttaatataattttatatttttatatttaatataaaaattggtatgtaataaatgtgattgattttttatatttgttttttaggggtttgttttttttttttaatagttattaaggttggatgtagtggtttatatttgtaattttaatattttgggaggttgaggcggggggattacgattttaggagtttaagattagtttgattagtatagtgaaattttatttttattaaaaatataaaaaattagttaggtatggtggtgtgtaattgtagttttaggtttttgggaggttgaggtaggagaattgtttgaatttagtaggtggaggttgtagcgagtcgagattgtgttattgttttttagtttgggtgatagagtgagaatttattttaaaaaaataaaataatagtaataataagaaatagttattaatttttatttggagttttattgtttttttatatttagtttttgtagtgtgatgggtagttttaggattagtttatgattcgatttaaagaagtaaaatgtaaaagatttttaggattaagaaagtaaggttttgttattagatttgaatttaaagggaagagaagttggagggttggtaggtattttattattatgaggaggagttttggaaaggtaggattaagatttgttttaagatgagattagagaaattttggagtaatttgttgtttagttttgtttataagatttagttatataagataattatatgattttgttgttttgggttttggattttttttgttttaaaataattttagtttggttcgttattgttagtagtatatagagtttaaagaaataatagtaatttgttaataatatttgtatttatatataatatcgggaggttttagtagaatttaattggttttttttatggtattggtttgggggtgtttttgttgttatgagtgtttttttgtaaatatgtagatgatgaagtttgttttaattttttaatattttttttttttagttttttttagatttttattgattatatagttgttattttgtttaagatttttagttttattaacgtgagaattaattaaagatataaagatataagaaatttattatttttatttttttgatattatttgaggttttacgaagaatattttatagattattttggttaaaatcgttagggatgtttaataaatgtttaattttttggattttttattagatttatcgaattataaatttttttagtaagaagtgtatagggatttgtatttttagtaaatttttcggtgaatgttatatattaaagggtaaaagttattatttgagttggggaggaagattagtaggattagttgaggttattgttgaattttaagaaatgtttttttattgttgtagggataagttttttgatgagttagaattagggttttttttgttatttttaaattttgaataaaaagttgtgtattttttgatttttaagggtttaattagttttatgtgtatgatttttagaaggttacgttattatttcgaggatttatttttttatttgtgttgttagatttaggaattttgtatataattattttagttattatttttagtttttataatattaataataatttattaatgataaaaaaaaattgtaaatatttattgtatgatagaagttgtgttaagaattttgtagatgttattttaatttatttttataataatttatgggatagttgtggtggattattttaatggttttaatatattatttttttttattattaggtattttgttatgtattttttagtttttttattaaggaggtagaatttatttttttttttttgaatttgggtttatttttataattttttttggttagatgaggtagaagtgatggtgtgttagttttgagtttgtatataagatattttgtgagtttttatttaatttttgtgtttttgttattgttataaggatatgtttgatattttagagggaggatgaaagatatgtagagtaggttttcgagttaatatgatttagttaagttaagattagagtagagtattttttttttttattgaattgtaggagtaagagtagtttagtttagattagtgagtttgggttaggttagttggttttagttgttttattgatgtatgagttttaagtgttagttgtttaaagttaatgaattgggtgaggtggtgggaagagagaggttgttatataataagtttacggtaatagttaatagatatattaggtaatattaatatttttattttatagataagaaaattgagggttagtgaagtaaagtaatttgtttaaagttatattattaatagtaagagttaaagttgggatttgatgttagatttatttaaagtttaggtttttaatttatattaaattgttagttattgggttgaggattttggtttttaagttatgtgtttttaatttagtgtggtttgtgagttttaagtagtttttgattttaaagtgaatttttggtaggttgtggtggtttatgtttgtaattttaggattttaggaggttgaggaaggtggattttttgagtttaggaatttgagattagtttgggtaatatggtaaaattttatttttattaaaaatataaaaaaattagttaggtatggtggtgtacgtttgtggttttagttatttaggaggttgaggtgagaggattatttgagtttgggaggtagaggttgtagtgagttaagatcgtgttattgtattttaatttgggtgatagagtgagattttgttttaaaaaaaaaaaaaaaaaaaaaagtttttaaaatatttttaatttttaaataaaaaaaaataaatttttttttttagattttattaaaaattttggaggtgaggtttaaaaatttgtagttttaaaacgttttcgtattattttaatgtatttgtggggatgaatggtttatatttggagtaggagagaagggtttgttttaaacgaggggatattgagtatttattgaagttttttttattttataggttgtgaatgtgtagtttattttaatttatttatgtataagaaaggaagtttgtaggttttaaattagaaaggaataaggtgttttattgggagtttaaggaaagaaaaaaaatatatattgtattttttggatgaaagggtttttaatttttaaaatataaattattttttatattaaagtttttttaagtttaggaagtttgttggggttttaagttaggtaaatagtttgtgttttgtagattaaggggtttttgatttagaggatttatttttgtgaaattttaaaggaaatgtttggtttatttttagtttatatattttttgatagaggtagttttaaatgtagtttgagaagaaggtcgtttttttgttgggagtggggtttagtatataggaggtagttagatgaatggaaggttttttgaaagagattttttgttttaaaatattatatttgtttttttgttaggatgttttaaatgtttattatagaataaatataattttgaattaatgaaaatttttgtttaaggaagagggttaattatgttaattagtaggagtaggtatatttttaatattttcgaattgaggggtatattattttattcggtttttataatatcgtgttgttggtataacggggaaattgaattattattttataggtaaggaaattgagaattgaagtagtgtgtttaagattatttaagtaagtttttatgtttttttttaattagattttagttataggaatttaataagggtaagataaagttagaagtagggttatttgtggaggataaattagagtatgttattaggtttagttgatatttaattaagttaagtgaaaatattttaattttagtttttattattattatagaggtaagatttggggtaattgatatttttaaatttttggaatttggtttttgtatttgtgtaacgaggaaggtagatttaagtgtttttttatgttttttttaagaattatagtatttgttttggattataattttgtattggtgaaataaggaagaaatttgtattttatggagggggtgggggaggggaatagagagagagagagaattatgtttaattttggttcgttttggatgaggggatattgtgttagataagagagatcgagtttgaggaagtgaatggatttgatttgtttaagttttagtaaagtaaatattattgaaatgttggttgagcgttattgatttttaaatagaaaatggtttttagatatattgtgggagtttagtagggtttgttagagtgagtgatggggtggttatgtattgttggagagtagggagaaagattataatattttttcgattgagacggatataaatagttagtttaggaggaggagagaaggtattagttgaatgttttttaaaaggtttagataatttatagaaattttagaagggtttttggaaattgttaatttaaggttgtttgagttaagttacgtggttagatgttaagagagttggtgagtgtagtaagtattgatgtgggagttaggaggtttgagtttagggtttagttaggtttttaatttattatgtgatttgagttaaggtttattttatttatagattttagttagtttgtgtagaaagttggaagttttaaattatttttaagggtttttttaatttaggtattttatgatatattttatcggtgatttatttaataggtatttattggatatttttttaatattagtgatttttttaataggtatttattggatatttttttaatattagtgatttatttaaaaggtatttaatgaatatttatttaatattagtgatttgattaataggaatttaatggatatttatttaatattagtgatttatttaataggtatttaatggatatttatttaatattagtgatttatttaataggtgtttaatggatatttatttaatattagtgatttgtttaataggtatttaatggatattttttaagtgttatgtagtgtgtttagatttttttaaatttaaaatttgttttttgtgagattattaatattttttttaggtgggtattggtttaaaggtattatttaatttagttttttatttttaggaggtatagttttataatatggtttgatgtttattttatttttgatggtttatagagaagagaaagggttttttttgagaattattaagatttcgtgtagttaggatgttttttttttgaatgttatttgagatttgtttgatgtttagggaggtagttattgttaaggttgatatgtatgggtaaaagttttttggtgtgtatatttattatgtgttattggtattattatttatatgttaggtatagattgaaaagaaaattttttagaaatgttagggtgatgttttttttaagtgttttggaatattttaaattaaacggtttttaaagagaatgaaatgtagttgttttattttatgaaaaaggaaattaaggtttgtttaaggttttatagttagttaatggtaggaaattaaaagtatagattatatttttatgtttttttttgtatatggtttttatgattgtaaatatttttttttgtttttatatacgttgatttatttttggtgggttttgtttttttttgtttttaatataggaattattttttaggaagttaattttttaaattcggttttttattatttcgagagtaattacgttgtaatgtgtgtgaaggatggagaaatatttggatttttggggaatacgttggagaggtgatagagagggtgggttgtgagggtgggagtgaaatgtgggagagagagtgtgtgttggggagtagagggagtaagaatgttgtagttaaatgtagagatggaaataaagtagtcgtattgatttgaaaaggtagtttattgaattgacgttgttagtttggttttttttggtttgtttttagtaggtttgtaaaggtatatacgtatttttggaggtttagaattatttattttgtatgtagagggtgaattgtggggaatggggattagaagggatgtgtttgtttgatagaatgggagagagaagagaaaaaaaaagagaaaatatgagaatgaaagaggatagtttttttttagatgaatataatataaaagtaattaggtgaatgggtttaaatggataggtatttgattttacggaaatgggatggggaagttttttttttaagaaaaggattaatgggagagagggagaaggggttaattttttttttatttcgatggttttatttttaagtagatttcgtttttttttatttgattggattagttttttaatttagtttttgaatttaatttttttttttttaaatttttgtcggaaagagatgtttaataaatgtttgatgagaaaataaatagtttttaatattgattttattttgttaatgatgacgaatttttagcgtattattatttttgtagagaatgtaaatttaaaaatttatagtttaggtagtaaatataaaggaatgacgtggttaggtgtagattttaaaaagggaatacggtgataaatcgtaggtataggttttagtttggaaggatagtagagagtttttacgtaggaatgagatttttaggttgttgggttatttgttttaggataagttaggaggaaatataggtatatgaaattttttttatttaaagtattgattaatgtttttttttttattttagttttgtgagtgttaaatataagaatatagttatgtgttgataagtgtatttgtttgtgattataggtttataggattaagtttaaatattttaattaaaagtttaagatttttttttaattatatttaatttaattttttagttttgtttttgttttttaattagaattgaatttgtgattatagttagtttaattttgataggttgggaaatttattgttgtttttatagatatagagtagtttttttgtttgtttttgttttttggatttagtttaagttttatttaagttttgttttttttaggaagttttttttgatgatattagtttttttttaaattttatagtttggagggaatataagtgttttttgttttttaaaagatatattatatttttatggttatttagtagagtattatagttagaagagtgttttattgggaatttaggatgtttgggttttaattttggtttttttatatttttttttgaatttgttgggtaggtagttttgggtaagttatttttttttttgagatttaatttttattacgtttgaaataaagatattggtttaagttagtagtttttaaagtgggtttagaggtagttatgatgtagggaggagtgttgagttgtaggagaggatatttaggttaatgttgttgtttttttgaaaaatattaatttttaatttttaaggttttgattagtttttggtatttagattatgaggtttttgtttttgtttttgtttttttttttttttgtttttgtaattagattgggtttttttttttttttttttaagttagttaagttttattgattatgtattatgtattacgttttaggtattgtattagatgttgtttttgttttttatattttttgtttatttttaatttttaataatgtgttgggtatttgttgaaagatgtagggagaagaataataatgataggtgtttttttttttacggtttttttcgggatattttattttggtagttattttcggtttttggaatttaattttttttttataagtggagaagattgaaatagaaggaattttttagattaaaaaataggcggggtgggggcgggcgcggtggtttacgtttgtaattttagtattttgggaggtcgaggcgggcggattacgaggttagaagatcgagattattttggttaatatggtgaaattttatttttattaaaaatataaaaaaaaaaaaaaaagaagaagaagaaattagtcgggcgtggtggcgggcgtttgtatttcggaggttgaggtaagagaatggtgcgaatttaggaggcggagtttgtagtgagtcgagattatattatcgtattttagttttggcgatatagggagatttcgttttaaaaaaaataaaaaataaaaaaaaataataataaaaatataggggggtggggagaaagaaggaaggaagaaaagaagagagggagaaagagaggaggatagtgaaaggaagatgaaataagagaaggaaaaatgaggtattaaatgagaggggaagataaaattttagtttttttttttatttggattgttgtttttattaattttgtttttttttagattaagagtagaataggttttttataaaaatttaggtagtaaatattttaggttttatgggttatagtgtttttattttaattatttagttttattattgtagttagaaagtagttatggataattaataaataaatgagtatggttgtgttttagtgaaattttatttgtaaagattgggagcgggttagatttggtttatagatcgtagtttgttaatttttgagttagatattaatatgtttttttttttttttatagaatttataattatttcgtgttatatattttatttgattatttattattagtttttttaattggaatattagtattaagaggttaggttaaaatttttatttgtttgggttaatcgtatattattaatttttagaataatgtttagtatatagtgtaagtttaatatatatttttggaatgaatgtatgaatatgaatgtaaatttttggatatgaatgaatatatatttttggaataaatggattttattatttattttttagtaagtgttaggtattgtattttgttgtttttttaattttttataggaattattttttttattttatagatgaggaaataagtttagagaggttaagtgatttatttatcgttatataatttatttattattttaaaagaaaggatttaaatttaaggtttttttattatagtatagtaaatgtaattttttttgtaatttttttttttagaatgtaggttattttatatggttttaaaattttgggtgggttttggttttttagtgagtttttatgaatagttttgttttattattaggttatatttatttatatggatagggtttgtttgtttagttgtttttatatttattttttttttttgtttttttttaagttttttttgtgttttagtaagaatttatttttttaagttattgttttaggaataattttagtttttatttagaggaggatttatgagttgttttttttttttagagttgatatttaaaatgattttatttatttatttagaatttatattttatttatttttaaggtatagttaaggtgatattataaagttaaataagatataaattaggataattaaaaataaaaatggaataaagaatagttaaaatgagtgaaggaatagatattattaggtatttgggatgagttaattgatttggatttagatttgaggttttcggtagttgaagtaaagttaagttaattggtttttaaggggttaaaatttatgagtagagttttattagtattatattttaatttttgagggaaaaaaaaaaggttgagataagaggtgtgatagtgagttttatttttaggatgtagggatagatttaggagttgttttatttaagaatttttttttttttagtttagttaatttttaatgtattataattgttgaaaaagggtataggatttggagataattttattttatatagggtttagaagtcgtaggatttaattgagttattgatattttttaaattttattttttgatgtgtaaagtaagattttaatttatttttacgttattgagttgttgggagacgagaaataaaaaatgttaaatgtttaatttatgatggggagagtaaatttgtgatttatgtttattttttttaaagaattgttataaggtaaattttttttagatatagttttttaaatgtattagtttttaagagaataaaggaggggtaagtaggtaagaatcgtatgaaggtttatagagtagggagttagtgaatattaatagtaaaaggataagaatgaaaaggttcgaagagggagatatgattttggatataaatgtttagtattgggtattttattagttttaatttttggtttttttttaagggttaagatagttaagtatagtaacggttttttttggattttttttttttatattatagtttagatttatgttttttattttattttttaataagtttattattgttaaattggatttttaagtatatggaggtttttaaaggattattaaagttaaggaatgtaaaagttgggaagatattatagatttttatatttagtattttagaaaaatgatagttgtttatattggttatagtaggtatggttttaaatggagattcgattttttataacgtaattttaatttatataatgagaaagaaaaatttttttttagtttttttttaattttgattatattaaggaaaaatgtttatttgggtgttacgatgttttgagtttttttttaatatttgtaaatacggatgatttttaatttataatggtttgattttgagagtttaggatggtgtgtaaaggatatatatttagtagaaagtaggatatttttttgtaatatttagtaatagtagtagtgagtcgtagtttttaattagttacgattttatgagaataaataattgatattttatagtgtgcggtgatgttagatgattttgtttaattgtaggtaaaggtaagtgttttaagtatgttgaaggtaggttaggttaaattacgatgtttggtagattaggtgtattgaatgtatttttggtttatgataggtttattggtaagtaacgttattataagtttaagagtatttgtattattattattattattgagacggagttttattttattacgtatgttggagtgtagtggcgtgatttcggtttattgtaatttttgttttttaggtttaagcgattttattgatttagttttttaagtagttgggattataggtatacgttattatatttagttaatttttttttgtatttttagtagagacggggttttgttatgttggttaggttgttttcgaatttttgattttaggtgatttgtttttttcggttatttaaagtgttgggattataggtatgagttatcgtatttagtttgtattattttttaatataaagaagttagttataaagattagagatttggataggtaagaatatagttaaatatgtatgttagaatataaataaaaatggttgtattgttttttggtttttattatatttatttatatagttattttttatgtagtgtaaataatattttttttagttgtaatgatatgaaattttttatggaaatatgtgaatttaagaagtggattgatttaaagagaaatattaagtagtgtagatggattgaaaagataatagaaattgttaaagtggtgtttgaaagattaatattttcgaaatattgatttaatttaatttttttgttttatagataaagaaatagagatataaagaagggaaatggtttgtaaaaagtgttatataagaataagaaattttgagttagattagtttgagtttttattttaaatttgttaaatataataattattttttgattattattttatttgtttaagtttttatttatgtttttataaaatgggagtttttaagtatttgtattattatttggtagatttttagatatcgtatgtttggttttggatatataagatttgtaagattatttcgtgaatgagaggcgatttgtgagtaaaattaatttaatggtatttgtgatggttagatattatttttatttttgtttttaagatataattattattttaaaattgttttaaattgtttttatatttgtgttggaaaatttatgtagagtattaagtaagtaatatgttagagaagttaagtataggttttggaattgaggtattttttagtttaaattttaggtgttttattataatattaaagaattgtttaattttggtaagttgttttatttttttttgttttagtttatagatttataaaatagagatgagtataatatattgggcggatgtttgggttaaattaagtaatatatgtaaagtcgttagtagagtgtttgtaatataggaagtatgtattataatgtttttattattattagaatatagtgttaagttgagttttttttaggttatttagtagaatggtattttggttgttgtgttgtgtttaagatgtgatttattaggtgtgacgggagaaggatttatagttgtataaagtgtagatgtaaatagattgtttcgtattgtttacggggaatgagatatggagttagtgaagggtgaattttagaagaataatcgattaaaaatatattagtaagagaaagcgggttatatgggttacgttttttaagttataaattttgaatttaataattgttttatttttcgtttggtattatgtaatatttttttttcgtttattttttgaatttattatttttattatatttatattttattttatgaatttggtttttttaacgtgtttgttttttttgtacggtattaatattttgtttgaaagttatttttgttttttaaaggagtttttgtatttagaagtttatttttttatatttaatatttttttttttattttttatttttatttttgtagggtgttttttaattaggttagtaaattattttttttttatttagtttttaataagtaagtgatttttgatagatattgaaatttgagatgtattatttgtttgaggttgtgttatatagaggaagtataatgtataatgttttttttttattttaattttttggttgattttaatttatttatttagattttattgcgttatttaataatatatgattgtttagatttttacgtgtttatatatgttgtttttaaggtttgaaatgtttttttttaatatgtttttttaatgtttttttattagatttaatatatttaatttatattttttttttttttgttttaatcgtttttttatttttaattataatttttttagttgtttttttttttagagtttttatagtatgttggggagatggtatagatggagagaagtttaggggaggaagcgggagttagaggagtttagtttgttttttattttgttgtgattttttttgtttttttaagtaattggtttaatattttttaatttgttttttgattggtaaaatttggataataattatatgttatttattttagaaggtagtagggagaattatttgggatagtgtatataaaatgttttattgtagtggtaaatgtttaataaatatatattattattattttggaaaatatatataaatatatatgtataaatatatatatatagtttagtatttttatgttatatttagtttggttaatattatttttttttttgtattgtaagttttttaaaagtaaaggttatattgttttgtttatttttatgttattagaatttagaatataataggtggataatatatttattaattgattaaatttttttggagtaggaatagatttatttttttattttaattatagtttttagtataaggaatagtttttttatataagtttattgtatgaatagatgaaaatgtgggtggatggatggatttttaagatgttttagttaaaatgtttatttgatatttagtgttgaggttatgaatttatttttattttttagtttttgatattatatatttaattttaaatgttatagttattatttaaatatgtaaatagttttgttttattgaaagaagtatttaattagattatttattgattattttttgtttatgtttgatattttttttaacgtagtttttgtagtggtttataaaaattttataagtatataaaaaaatagagttttagattttttgttttgtttttaatatgattagtttttttttataattttaatgttttagtatttattttttttttgtacgaagataaataaaagatattgttgataaatttttgaaaattagtaagaatgtatgtaatattttgaatgtaggtagtatttagatggtagtttaatttttgggaataagtgaaatcgagagagtcggaagtatttaaaatttttgttttattgaatatttatatatatatttgattttatttatgttgtgtagaaatattttttagattgattttgttttaagtatatttgataataattttagattttgaataatattattttaataatttttgtttttttaattttatgttagattttagttttatttttttattaatttttttgtgataagaaggtttttattatggtaataaattttttgggagaaaaaaaaattttatttttggatgtttttatggaaaagaatgttttattagttgtaatagttttaattttttttattttaaaagaaatgattgattttattaattttttaaagaatattttagaaagaggaaaataagtggttttaaatattttttataggtgattttatttttttgttattttattttattgtttgttttatagtaatattttatttattttttaaggttttattttatggtagtttttttaatttttttattttatgtacgttagttatttttaaagttgtattattagttttaattaggtttatattagaaggttaagtgatttttttaagtttatttaattagtaagtagtagagtagaaatttgtatttaagttttttgaattaaattaacgtggattttttattatattattttcgatgtgtaagttttgatgatgagagttaataattattgagtatatattatgtgttaagtattgttttaagatttttaaatttatagtaattttatgaggtggttttttttgttttgttttgtttttttaattatatttattttatagatagggtaaatgaggtattatattgttaagtgatttgtttgagattgtatagttagttagaggggaagtttgagtttatatttaggtagtttagttttagaatttgattttttaattataaagtatatttaattttgatgttttgacggtaggatttatattatattaaatgtatttattaagtgtatgtattaaatagtgtattaaataggttagaatataaaaaaggtattttatgtttttgattgtttggagatttatttatatatatatttaatgatgatttattatgggtaagatattattaagatattatagaagataataaattaaagatataatagtagtttgtatttaaatgtgaaatatgaaatagatttattttgtttgatttataatattaatattagtttttttgattttatggttaaattaaatttgtaaaattaattttttggattaatgtgaaattattaatattttttagttttaggaaaggttatttaataaaatagatattgtaattatcgttattagaattttgtaagggaaaggatattttaattattaataagaaatagttagggtataatattaaaataaaatattattttttaaattttgatattaaattttagattagtatttaagagttattagtttgttagagttggttaaaggtggatgatatagaaaggtacgtatatgaaaaaaaaataattttaataggtagagattgtaataatagaatcgtaagatagaattgaggggttttgatagtgatatttataaaattaagaaagagaatgaaaattttaaaggtattttagattatagagtttgtgattttatggtgttttttttaaggaatttaaaatgttattaaaatatatttagaaaaggaataaagtaaaggttttgggttgttttatggtttttttacgttggggttttgtttgtggtggattgttaagaaaggtagtttttatgatattaatcggatatgttaggtgtttttatagagtttattagatttaatgtggaggttgttaattagtaagagttagaaggtttaatttttttatagatttttattttttttttaggtatagtagaaagttgtttatatagatttattttttggaagtttttttttttgttttaaaatattaattattttgaaaaggtttggaattaatgtttgtaattttgttagtagagtgatttcgtttttatagttttaagagatttttttatttttaagaataattgtaatttgttatttgtatagtttttttttttattagttttttttttaagttatttaggtatttttgaaatgttaatgtgggtaatgaggagattaagagtagagattttaagtagatagatttgtttttggtttaagttatggggtttattgtttatgcgggtaagttatagaaatttttttaattttagtttttatattagttaaattatattttttttataggattttattttttttgtgtttttaatgaaatgatgaatataaattatgaatatcgtgttttgtatatattgtttggttaaaaggtagttattattattattattggatattattattattattgaaattaattaaattttgattttattttgattaatggtttttttttatttttaaatgtaaataattatttgttgttattttattttgttattttttatattttattgtttattcgttttttaatatttttgtttttgttttttagtttttttgtaaatattttttgtaagttttaatttgttttattttatggttatttttttttaagttgttttttttgtttataatgttttttcgattttattattatttttaaatttaataaattttttattttttttaagatatttttaaggatattttttggtttatagtaaaataaaatatagagttattttatatatatttatttagttatatgtatagtattttttattattaatatgttttattagaaatgtatatttattataatttatgaatttatatcgatgtattattattatttaaagtttatagtttatattaggggttattttttgtgttgtatattttatgggtttggataaatggataatgatatgtatttattattatagtattatatagaatatatatattattttaaaaattttttatgttttatttatttattttttttgttttatttttttttgataattattgattttattagtatttttatagttttgttttttttagtatatgttggaattatataatatatattttttttagatttattttttttatttagtaatatgtatttaagttttttttatgtttttttatggtttgatagtttatttttttttagttttgaataatatttttttgtttagatattatagtttattagtttatttattgaaggatattttagttgttttcgagttttggtaattatgaataaagttgttataaatatttgtgtgtaggtatttgtgtggatattagtttttaatatttttggtaaatgttaaggattttgattgttggattttatggtaagagtatgtttagttttgtagttgtcgttgtattattttgtatttttattagtaattagtgagaattgttgttgttttttatttttgttagtatttggtttggttattgttttcgatttgggaaatttttattttttaatatttattttaaggttattttttttttgaagaattttttgattttataggaagaggaaataatagtttatttatgattttaggttaatatttattatggtgttatatgtgtgggtttttggaggatttggattttgttttatttatttcggtattacgtatagtgaagttaggtttggtgtatagtatttatttagtaaatgatttattaataaataaataagtaaataaattaaattattgataagtgaatgttttggtcgggtatgtgtggtgtaaatgtagtattttataatttgtaaagtatttgtgttttaattaaattatttgattttgataattttttggggtttttataggaaatttaggtttagagagtttgagttatttgttaggttgaaatatggtaaagaaaagatttgaatttaagttttttaaggttttttttatataaaaatatagtttttatgaattaaaattaaggatagtttattagaaaaattttcgcgtaagagtttgttaaggataggggataggtaaaaattaagaataaaattgttggttttattgtaagggagagtgtaaaaattaaaatgtgtggtgtttggagtttttttagatatatataggggaatataattgtattggttgtttatatgggataattgttagtgtgaagaaataattattaaaaatatattggaaatagattttattagttttttgattttattaatggttagttttattttttgtattgtattttttgttataatttaagttttagtttttggagagaagtcgagagatttttgtaaatgttttttttttagtagatggagtagaaatcgagatgcgttataaggaagatggattggtgcggtatatttgtaataataaaaatatagtaacggttaaaagtcgttttagttaaatagaattgggaattcggggttggtttaaatttttttttaattaaaagtgaaggagaattttaaagttttattttagttttttaaagtattagtgtagtgaatgtggaatgtttttgtgtttcgttgggtgttagattgtttaagatttatgtgggttcgggttgtagttagcgaaaagtttttagtagggggatttgtggaggggaagtgtagaggggaaaatacgtaggtaggaaaatttggatttagattcgagttttgtttttatgtgatattgagaaaattattttttttttttttcgtatttttttatttttagttttttattttttttttttttttaagtttttgtattatgaatattttttagtatttgttttttttttttttttttttttttatttttgaagtttgttttaagatttagatgtatagtttataaattgtagttttaggattatttaaaacggatatgtttgggtgttttttagatgattttggattttgattatggatttagtgagtaaggttttaggattttgaaggttggaattttgtttgttaattaatatttaacgtgtggtggggatatatattagtatttgggaataattgttttggatgaaggttgttagagtagaggattttagtttgagatgttttttagaataggggaattttaataaaatatttaagttagagttttattcgagaaaatttgatttattgggtttggatagggtttagatgtatttatttttaaaataagtttttgagggttaataatttatggtatataattattggaaaatatatagttacgttagtaatacggatgaatttatattaagttgtcgttttttattttttgggtgtttttttttatagtttatatagtttatatttttttggtttttaagattagttatatgggtttgttttgttggatgatttaggtattagttggtgtatatatatttatgatatgtatatttatataatataaagatatatttttttatatgtattaagaaatatatattaaaaaaaaagattgtatatatattcgtacgtttatgaatatgtgtatatatatatttttatttttatatattagtatatttaaaatatataaattttattttaagtattagttttggtcggtttaattttaatagtgttagttgatatatttttaaaataaaaattgtaatatttgttttatggttgtgaaattaaatatatataaaaatgtatttgttttattattagaaatatagtagatgtttaataaatgtatgttaaaaattataagtgtatttatgtttttttttttttttttattttaagttttgggatatatgtgtagaatgtgtaggtttgttatataggtatatatatgttatggtagtttgtgtgtatttattaattcgttatttatgttttaagttttatatgtattaggtatttgttttaatgtttttttttgttttgttttttaattttcgataggtttaggtatgtgatgtttttttttttgtgtttatgtatttttatttatttataaatatattatatttatataagtttatttatttattaatgtatttagaaatttatgtaatatatttaaatttatttgtacgtgaaaaatttttaagtttatattttatgtgagtagtatatatatttgtatatatatttatatatagagttgttttgatacgaaatgaagagttttatttattttaaatatttttttaagtaaggttttttttatatttattaagttatgttattggatttgaggttttgtagaagaacgtggaaggcgaagtaaataattattatatatgaaatggatgttaggtttgaaaaaaaaaaagttttggtaatataagttaatgttttaaaggaagtataaggatggagattaataatagtttattatgtgtatataagaggaagcgttgagggaaagttaggattgaatttttaaagtatttaataatgtaaagtatttttttatagattttatagaaattagatagttatatattatttgtatttttttgaagtttatagttttaggaaagatcgatgtttaggggtttattttttgatatgatattatgaataagttgggttaatatgaataattatagtaggaaagttaatgagtaaagttattatttttattttgttttaagttttttttgtttttttttttttttatttttttattttttttttatttttgggatagagttttattttattaattaggttggagtgtagtgatataattttggtttattgaaattttcgttttttgggtttaagttttagttttttgagtagttgggattataggtatttattattatgtttagttaatttttagtagaggtggggttttattatgttggttaggttggtttcgaattttcgattttagatgatttttttgttttagttttcgaaagttttgggattataggtgtgagttattatatttagtttgttttaagttttttattatttaagataaatgtttgttttaggtattcgtaaagttagtaattattttaagaagaatttttataatgtgtagaagttttatttgtttttattattagtgtttttggttagtatgattaatatagtgttattaagtatgacgttttttttatagatattttttttatataattataattaagaatatttatattttagtgttatatatgtattttttttgaattgggaaagatggtgggttagataattataaaatgttgttgttttttaaaaggtttttattttattttatgattttatgatttttaagatgtgatttttttttttttttttttgagataaagttttattttgttatttaggttggagtgtagtggtgcgattttagtttattgaattttttgttttagttttttgagtagttggaattatagatgtgtattattatatttagttgatttttgtatttttagtaaagatggggttttattatgttggttaggttgatttcgaatttttgattttaggtgatttatttattttgatttttttagtgttgggattataggcgtgagttattatgtttggttagatttaatttttatattttataaatattatattttatgagtttattttgattgaatttttattgttttaagattttttgattttaatatttgataaattatgaaattttgtaatttatgatttaaagatgttaatagtatgattttgatattgtaatttataattttaaattattattaattttatataaatgaggtttttagatttttttttttgagaaagtaggagtttaagttagggttaaagtgtttgtatttgaatggggaaggtagagttagtatgtaaagaaagaatggttattaaaaagaagagtttttaaagtatgttttaaggttttttaaatattttttatagttttaattttttttttgattttattttatggtttaaagatttagaatatttattgatagaatttcggtattatcgaggtaagttttagttattttttttttttttatttttagtatttagtataaggtttggaatatagaagatttttaataaatattgagtttgaatgagttgattaaattattgtggtgtttttttttttttttattttttattgtttttttttaatttttttttattttttttttttttttttttttattttttttttattattttttaatagtattttagaatttttatgtatattaattatttaatttttataggaatttagtgatatatgaatgattatttttattttatagatgaggaatttgaggttgagaaatgatatttattaaagattatataacgttagtgttagagtgaaattttaattttgtggttttatgttagagtttttttttttattttacgtttgttttatgtttttaataataataaaaatattattatgagaaattaagaaaattgttgtttagagaggaggtttatattttttgtttttgaatttaattttgaatttatttttttaattaatattagtttttattttagagtatttaataattgagggttttttatatttaattgtttattttattttttagttttttttttttttattgagagtgttgtatatggtatgtgtttattttttaattaaagtaaattaaatttaattttgttttgagtattttttttttttttttttttttttttttttttttataattttatagtttacggtgagataattgagattttgttgtttttggaagtattatttagatagagtaggttttaatagatttggaataattttggaggaagttatttttaattttttttttttttttgatttattagggagagaatgagggagagagaaagaggtgaaatttatattaaatatttttttttattattgggaaatttttttttttattattttttggtaattttttaaaaatattattattatatttgaaataatatggattattagaattgtttgtatatattttttgatatgtttaatattttggtttttatggaaaatatatttgtttagtgtagagttttttaaagtatgttatatagaatattagtaaaaattaaatgaaaaaataggataaaatttattatttataaatttatttttagagatgatttaaagtgtaaattaatgattttaagttatgttttaaagtttgggaattttttatttaaagtttatataaaaatgtaatgaagtaagtggaaaatatggagttgttttgatgtgggtggtaaggtggggatgattttagatttaggtttatttgtttaatttttttttgtttttgtggtgggttttagtggtttttttagaatttttatcgaattttaggttttattttataagtgagaaaatttaggggatgtgagggtttagggaatgtatatattaggttagttatgatggtttatatttgtaattttagtattttgggaggttaaggtaggaggatcgtttaaggttagtagtttaagattagtttgggtaatatagtaagaatttcgtttttaaaaaaaaaaaataaaaataaaaatttgttaggtgtggtggtatgtgtttgtagttatagttatataagaggttgaagtaggaagattgtttgagtttaggaatttaaggttatagtgaattatgattatattattgtattttagtatgggtaatagagtgagattttgttttagagaaaaaacgtaagtataaattatttgataaatttttagtttttataggtattattgtttaggttaagattgagtaaaatagagaaaaaaattaagtttatttaaatttgatttaaggtggatgaatgatttagaaattgagaaaatagaattaaagtttttttttttgttttgatttttgtttttacgataaattgtttattgattttttatattttattaattaaaatgttgattatataagtaaattatatttattaaagaaatattagaaaatataggtaagaattaaagaatgaaatttattataattcgttatttaaagatgattatttaaatattaggatatattatataaaataattatgttttatatgatattttgaattttatgttttttaaaattggtaatttataaaaatttgatgttgataaatgttataagtgttatttattgagtatttattatatgtgaggtatgttgcgaagtgttttgtatatgcgatatttatttttaatagtataattagaaggaaggtattgttgttgttagttttgtttaaaaatgatatattcggtcgggtacggtggtttacgtttgtaattttagtattttgggaggttaaggtgggcgaattataaggttaggagattgagattattttggttaatatggtaaaattttatttttaataaaaatataaaaaaattagtcgggcgtggtggtgggtgtttgtagttttagttattcgggaagttgaggtaggagaatggtgtgaatttgggaggcggagtttgtagtgagttgagatcgtattattgtattttagtttgggcgatagagtaagatttcgttttaaaaaaaaaaaaaaaaagatatattttatttttattttattttttaatgtataaatgtgtttttttaatattatttttaaggattatagaggattttattttatgttttgttttgttttttttttttttttaaatattttgataatattttttttttatagatttgtatatatgtaattagttgattttttagaaggggatattttttttttttttaaaagtatttgtatttttttttttttttaaaaatttggtatagagataaagataagagatagaaatagagatagaaattataaagatcgagatagagatttaatttttgtttttataataatgtattttttttttttttttttattttttattggttattttattttagttatattggtttttgtatatattgatagttttattttaaaaatgttatgtttgttgtttttatttggaatgttttttttttagatatttatttgattttatttttgattttttatagatttttgttttaatgttattattttagtgagggttttttttatttatttatataaaatattaagtttttttttattaggttatttggtttatatgtattattttttttttttttattatattttgttttttaatatattatatgtttatttttttatttataaattatttttttaattaaatgttagttttatggtggtaagaatttggttagtttgattttttgttgtatttatagtttataaaaaagtatttggtaaaggatgagtgtttaataaataatgtttgtttagttgggtatagtggtttacgtttgtaattttagtattttgggaggtcgagatgggtggattatttgaggttaggagtttaagatttagtttgggtagtatggtgaaaattttatttttattaaaaatataaaaattggttgggtatggtggtgcgtgtttgtaattttagttatttaggaggttgaggtaatagaatcgtttgaatttgggaggcggaggttgtagtaaatcgagatcgtattattgtattttagtttgggtaatagagtgaggtttcgttttaaaaaaaaaaaaaataaaagtttgtttatgatagaatgaaagttatattttataaaagggtatatttaatatagatttttattaatgttgtgtgatagtgtttttttttttgtattgttgttaaaattggatgttgttattaaattaaaaagttattttgatgatagtatcgtattgttatttttatttatttgattattggagaataaaatattttgtattttttatatttattggttatatgtgttttttattttatttttagatagaagttttattttaagattattttttgatagtaggtgattttaatattatatttgggtttatgtttttttattagagaagaagaaatttgttttggatattttttggtatattagttgtttttttatttgtttttaattatgtttaatatttttttttttatatatgtacgtgtgtacgtgtatgtgtgtgtgtgtgtataagtgaagtagagagaaaaatagagatagatagagagattgtaatatttggttgttataatttgggttaatttaattttgttatttgttggtttgaaaaagtgttattgttatgattggtggttttggtggttttatttttaggaagaataagattttggtttttggttgtggtttagagttagaaagtagtttattttataattattgattttggtgttagtagtatttgaattaagggtgtagataagtatgttaagttaagattttttgtcgaggtattgtgaagttaaattattattttaagaggttatgaagttggtagttagaaagtattagaagagtggaagatatttatgatgttgatagataaagagagaaagtaaaacgtagattgttaaggagatttaagaaagttttttttagtggtattatttataatattttttggaatatgaaagatggatgttttttttatttaggtatgtataggattaggattgagggtagagtttgtatgatagattttattgtatgaagatttgtaatgattaatttattttaagataatagagattaggtagtagtatttaattttgtttttgggatattattaagttgttaatttataatgtttttagttggtgtataaaggaatggtaatttaaggatagaatatatatatatatagaatatatatttgttgataatatatattgggtttagaatttgatgtttttatttattgtatattttggggtaaatttttttatttttgatttataatgtttttatttggaaaatggggagaatagttataattttagagtgttattgtaaaggttaaatgagatataatatgtgataatatgtaaatatttaataaaataaatgagaataaggatgaagaggggaattataagaaggaggttgataaatatagtttatataagagtatttattatgttgttaattatttatttttttatatgtatttgatgaatattttgttttatatattagaaaattaaattaaaagtgagatgggttgtataaggcgaaggttttaaaattaatttagatacggattgattttaaaaagagtttatatgtattaaaaaaaaaaaaaaaaaaaggagagtttaggtatagtggtttatgtttgtaattttagtattttgggaggttgaggtgggtagattatttgaggttaggagttttagattagttttagtaatatagtgaaatttcgtatttattaaaatataaaaaattagtcgggtatggcggcgtgtgtttgtagttttagttatttaggaggttgaggtaggagaattatttgaattcggaaggcggaggttgtagtgagttgggattatattattgtattttagcgtgggcgatagagcgagattttatttttaagaaaaaaaaagagagagagagaggttggaattttagttggattgtgttgaagataattttttgtttttatggtaggtgattttatgtttatatttggtttttatatttatattttatttttggtttgttatagagaatttaaaaatttgtttttattattttgcgtttttttacgttttattttatttttttatttttttttttaattattgttattttattgttatatggtggggaggttagtagaaataattgagtatatttatttggaaggtagtgttttgaatttaataatattttttttttatatgttatttttagtttgagtatatatttgagagtatgagtaatggttaatttaatataagagggggtggaaattataaaaggtagtaatagttaatgtttatatagtgttgatgatttgttaggtattgtttgaggtatttgttatataaattaattaaatatatatatgtttttatgaagttattattattattgttgttatttttgagatagaatttgattttgttatttacgttgaattgtagtggtatgattatagtttattgtaattttgaatattttggtttatataatttttttgttttagtattttcgaagtagttaggattataggtatatgttattatatttggttaattattttttaaattttttgtagagataggattttgttaaatattgtttaggttggttttaaatagtcggttttaagcgatttttttgttttagttttttaaagtgttgggattgtaggtgtgagttattatgttaaatttggagttattatttttatagtatttattttatagataagaaaattggtatagaaatattaggtaatgtgttttatattaaatagttagtaagtggtagagtaggtatttaaattttagtagatttaagtttttaatttttgtatttttaagttagaaagaagtagatttaaatttataataaaatataattgatttagtatatggttttggttaagtggtattattgttttgagtttagttttaatttttttagaatggggtataatattatttatgtatgagtttgttgagaatatttagtaggatatttatattaaatatttattgtaatataaagaatatgttatatgtttggtatatttatttttttattttaagaacggttttagggtagtgatattttagttatttttaaatgttatggatgaagatttttttagagtttttttaaattttagtttatgttttgtttatatgtattatttttattgttagggaagagagagcggtaagtaaaaattggagttgatttggtaatatttttaggaattatttgtaaggttttattggatttttaatgttgttgttttattgatatatatttagaataaaattttttataagtttttttagttttttttagtttcggttaattttggtaatagtatttgatgtggattattttatttaaaagaattgtgtttttaaaatgtgttttagtagtaaaattgtattattaatttttgttaggtaatttattttttaattttttttaagtatattaaagtgttgatttttttttttaatggtttttatgtttgtgtagatgtttttgtcgttttagtttaggttttttgtaggttttttttttattatgcgtttgtaaatttagaatttattaaattttataagaaatttggtttatttattattatgtaaagggaaacgtacgtatttacggaaggtagttgttttttttatagttttttgtttgtttttttaggtttattttggagtttttggggattttaggaattttatagtttattagagttttatttatttttgtagattgttaaattttagaatggagatttgagaatttattattttttttttaaaaagtaattatattttggatgtttgttttttttttaattgaattagtttgtaatttgtaacgtggttaaacgcggttgttttttattatttttaagttttattattttttatagaggtttttaatggtttatttgtaggatttttgtaaggttagataaattatattttagaaattttttagggttagtattgggttaatttttataaagggttttagttgtttatataggttatttgttaagagttttgttgttttgatttttgtagtttatataaaaatggttgtatgttgtttttgttaattattttattaatttatttgttatttttgagggaatatagttttttagttattttaagatggttttaatttttcggtatataatttcgtattttgtgagaaaatttttgtaaattgagaataaaatttgtttagaatgatatattttgtgtttttattaggttttttatttttgtgtggggatagtaggaagttcgggtaatttatgattttttatttttttttttatatttagttttatttagtttattttttttaaggttatttgtaatttttaaaagatagtttttttaggagataaagattttttttatttttatatgaaaaaaaaaattaattttatttttttttagttttattatttttttaattgttttttttgtttttttagtagtaaggattgtttatggatttttaggtagtttttttgggttgttgtgttttatgaggatagtgggttttatgttaatttttaattattttgatattaggagttgttattatggtatagaattattattttattattatttagttatattgtttcgaaatatagtttgtgttgtaaggtatgattttttttaaatttttttattttttagaagatatttaaattttatgaggaagtatagttattgtgtgtgtttttttttgtttttataagaattttgttatgtaatatattttttttttttttttttttgttttttttttagatagagttttattttgttatttaggttggagtgtagtggtatgattttggtttacggtaatttttattttttaggtttaagtgatttttttattttagttttttaggtagttggaattataggtgtgtattattacgtttagttatagtttttgtatttttttttttttttttttttttggagatagagtttcgttttgtcgtttaggttggagtgtagtggtgcgattttagtttattgtaatttttgtttttcgggtttaagcgatttttttgttttagttttttgagtagttgggattataagtatacgttattatgtttagttatttttgtatttttagtagagatacggatttattatgttggttaggttggtttcgaatttttgattttatgatttattatttttttatttttaattttttcgtttttttaaagtgttgggattataggcgtgagttattatgtttgattgtaatatttttataaagttaggtaatatatttttagtgaagtaagttatagttgggttttttttaatttatagaaggtaagtttggagagataaagataggtttttgagggggtttagatatatagtgatagaagttaggattggaattaggtattttgagtttttgtgtttttattgtataatatttcgaattaatggagatagaaaaagatattgtttgtgatttttgagattttatagtttattgtcgatattttttttattattattattattgaagtgtttttttttagatttttttttatttaaaatttttatagaatttttgaagtgataattattaatttattatgaatgataattatttatagatttgtagatcggtattattagattgttagtatttagtaagatttattattatattttttaagttattttgtttaaagtttttttacgataagatatgtaataaatatttgttgatttaaattgaaaatttttagtttttatttttttttataatattttatttaaattattttatttttatatatttattttttttttttttttttatttattttttttatttttgttttttttttttattttatattgttgtatttttagggtatggtatttagagtaggagtagaaattaaaatgagaaaatttgtagaaattattgattaaaaatggatataataaaaatttattaaaagtatttgataatgattttttgttaatttttaaattttttttagtttttaaattatttgttttttaattagagatgttaaggaaaagatgttaaaattttttatttttttgtataggttattgtgatttgtttttgtttatttttttaatttttttttatgttatgtttttaatttgaaagttttagttatattggtaggtagtttattttttagattttttaagtttgttttagtgaaatgatttcgtggtttgtttggttttgttttgttttttgaaatagggttttattttgttgtttgtttagttgtagtatagtagtgtaattatagattattgtagttttaattttttaggtttaagtgattttttaatttcggtttacggagtagttgggattataggtgtttagttgtttttttaaagatgattattattgttgtagaaatggggttttgttatgttttttaggttggttttaaatatttgggtttaagcgatttttttattttagttttttaaagtgttttgattagaggtatgagttattaagtttggttaattttattttatttttttttttgtttttaatgttttttttttataaaattatatggttgatttttttttatttaagttttagttttaatattatttttttagaggaggttttttttggttatttaatcgaaaattatattatttatatttttttttattatattattacgattagtggtgtgatatttaatattatataaaattattttgtttatttatttgtttatttattgattatttatttcgtttttttagagtgtgaatttaatgaaaataaataaggttatggttatgtatatgttatatttttaaagtttagatttgtgttatttaatagagtagttatgagttatatatagttatgtaaattaaaataaaaattaatataagttaaataaaattaaatatttagtttattagtaatattggttatattttaagtgtttagtaattatatatggttagtggttattatattggatagtataaaaaatatgtttattattatagatagttttatttgatagttttcgtttatagtaatgtttggtaaatagtaggtatttaataaatatttgttgaataaatttttatttaattttaggttattttttttttttttttttttttttttttggtggtatcgaagttttaaaagtgaggtaaattagataatttttttaggatagtatttagggtgttaagaggtttttaagtagatgttatagaagatagggttgtgaagataattttttttatttagaaagaaaattgttgtgaaataattatgtttttataatattcgaagaattgaaaattggaagagaattgtatttgtgtgattttagagatatatggatagaaggatgatttaggggtaaagtaagaaaatattttaataaagttttttaaatatgatataggttggtttgtgcggtaatgaatttgttattattaaaagtattaaaattgagattgaatggttatgtattattggtattataaaaaggattcgttatttttgaaaatagaaaagtttggttattgagaaatttttagaggttttttttgatttagtgatttatgatatttttatattattaattttaaagagtttataataatttttagttatttttagtatttattgaataattcgatgttgttaattatttataatagttattattaatttagtggtttagtgaaaagagtagagatgacgtaagaaggaagatagttttaaattttagttgtgatggttgtgtgattttgattaaggagtttaattaatttgggttttattttttttttttgtaaaaggggttgtatttgttttattgggtggaaagaacgattatatgagagaataaaattaaagattttggaatataggaagttaatatttatttttaggtagggtttaatttttatttgtttatattattattggaatttttatatttttggtataggtaaaaatgtcgtaacggtattgttttaaatgaatatgaagtaattgttagttagaaagtgtgagagatagagagagagatgatagttgttattgagatgtaataggaaatgtaagggtaaatatttataaagtaattattttgtgttagtttttggaatataaagatgtttttgagattatattgaagagggtaagatagatttatatttttagcgttataaagtagggtaaatagagatataaattaaaatagagttttagataaaatggtatagaaaaattaggtgataaagagattaattttaaaataagattttgagaagattttttggaagggttatttgagttagatgttgaaatatgggtggaattttgttaaaagtcgtggttgaatgtgggagatggtggaaagaataataaagataatttttgtagaagggagtataattggaaaaattatttgaagaatgatatttaaggatttgttttttttatatgatttttattttgtttttaatatggttattagtagtttagtagttaatttgttaagttttgtattttagtaagggaaaagtaggaaaagacgggtagggtatgtttaattttaatggtttatttaagtgataatgtattggtgattttttttaaggaattgggaggggaaaagagataggttgtaaattaaaaaatgtttttttgtataattgaaggggtttttgggtaaagatttttttagaaaaatagaggattttatgatttataatataaatttttgtaagtattaagaaagagatgttgaattcgaatttattaggggagggtgtttttataatttttgtttgtattagcggtaaagatatttattgtagtttgagttgggtcgtttaaatttaacgggggtttaagagttgatttggtatttttgagttgtttttttttggttgaaatggagttatagtttttttttttgggagttaaagtgttatttagtttcggaaaattttgtatggaaaaggttttattgtagatgggtttaaaatttttatgttttttagtatttgtttgtatttcgaaataggtatttagaagtttaagagtacgtttttgagtgaattcgattttgatttttttagggttttttttttatagggttttatatttttttttttttggagtttatgggttttattttttatatgggagatgttttatatgggagaatataatttggtgtggaggtttttttttttggaaatgtagtaagtaggaaaggtttttggatttttgtgtgtatatgtgtgtataagtatatttatgtatgtgtgtttgtatatgtttttgtgtttgtaatatgtattaatgtttaggggtgagattttaattaatataaagaaattaatttgtttgaagtatttgtattggtagatgggtgtatattttgttttttggaaattagtgtattttttaataaaaattttagatatagattagatattttgttgggttttgtttattagttatatttagtattgggtttttgtttgtcggtaattttttaaagatattggagaaggaatttatgttttttttttgttttttttttagttttttttttattatcgtgtgtgtgtgtgtgtgtgtgtgtgtgtgtgtgtgtgtgtgtgtgtgtgtgtgtgtgtttttcgggaatagtgattgaggtattggattttttttttttagggttatgtttttagatagaaaaattttgaaatgtatttttgaaaatgtgaagtttgatgagggaagataagcgattgttttggtaggggttatggtggtaggttggtaagataggggtgggagtaatatatagttttagagtgtatattgttgggaggagtggaaagggtattgatttagttgattgataagtttagattttagttttgggtatgttattaatttattattgaatgttggggaatttttattttttttttaggttatagagttttgtttttttgttttttaatattttttttagtttcgatcgtttgtgaattaggaaagagagaaaatgaggtagtttttaaaaatgggttttttttttggttttagtattttttatttaagataatttagggagttttgttttgatatgagttttttgaaggagattttttgtggttatgtgaaggttttagtttgaggtattagtttttggatagagaatggtatgtttgtaagtgtttgtaggtagaatttatttattagggtaggtttttataaatatatgtttgtttttatttttttttagaatatgaatatatgtgtgtgtgtgtgtgtgtgtgtgattgatatatatatatatatatatatttttttagaatatatgtgtatattttttaggttaaatatatttttattttttttttttaagagggttttttagcggttttttcgtgttgagttagataagaggttgtgttttagcgttatagtttttgtttttttttagtttttttgtttgagagtagaacggttgtcgtttattttgagaaagtaatagttgtcgagtttggaagttatgttaatagtagtaaaatttagtatttttgttgagtagggtaagtttttaagaggtagttgggaattaaattaatggttggttttagagtttaagtttaatagtattaagttagggtggttaagggatttatttaaagagttttttaggagatggaggaaagaagaaagagggttttgatttaaattatttttttggttgagatttttttatcgtttttttgtttttggtagtattttggagttaagtgagagacgcgaggtgtaaatcgatagtagtttaagttaattattgttatattttgttatgggttttatatttatagtttttttttaaattgtagattttttttagtattgaaatattttttttttttgtttttttttttttcgtttttgttttttttttttttttttttatttttttgtttttttttaatatttttttaattttaggggagttatggagaggtatatttagggagagattttttgggggttttttcgtttgaaatggggaaagaaagacgaatttgttttaggaaagtgttttatttatttttttttatattatttatagtcgttttagatgaaattttttttgagattttttgtaattgtgatggatgagtaagttttcgaggacgttttttttttttttttgagggggatttatgtaaatttgttagattttttttaaaattaatagaagtcggaggggttttgttgattgtaaacggggatgtagggtaaatttttattttagattttttaagttttagataaggagtttatcgttgatttttttttttttttgttatttattatttagtgtttttaaatttttattagaattttggagtttgtttagtgtagaatttaaagtgatagcgttttatttgtttcgggggttggttatgttttttttatattaagttgtgggttttagtgtagtaggattttatcgtttggaggaatttttttttaagcgtattaatattgggttaaataaggtgttatttatagttttataattttttttaaattttaagtttagagttttaagaggaagtttatagcgggtttttcggtgattacgtgattttatagtaagggttttatttcgtgtaagttggagagatttaattaaaaagatatacgagggtatatatataaatatatacgtataaatatgtatatatatatcgcgtcgtaagtaggttataggatttttttttttttattttttttttatatatacggatatatatatatattacgaatatacgtattaaacgtaaacgacgtcgtatacgtaaatatattagtattatattaagtttttattatggtgtatacgtcgggagcgcgcggggatatatacgttatttatttaaattcgtaattagttttttgagttttaggtataggaattttttttttagaattggagaagatttggaggcggcggggcggttaggtgaagagcggataagggtgtcggtagggggaggggtagaggagcgcggggacgtttcgaatgcggttcggggtcgggtttaagggtagcggggttgcggggcgttgtattcggcgtcgttttatttggagttaatgttcgtttttggcggagagttgcgggaggacgttttttattcggttcggtgggaatttgggagagttttgcgtgtagttcgtatttcgggtacggcgcggggattgtaggcgtgggggtatttggtttttagtagtttggtttatatttagtcgtaaagtttttttcgttggtttcgaggataggtatgaatttcggtttcggaaggcggttattattttttttgtttttcggttttttcgttttcgttttcgttgttgttcgttcgttttttttttttttcgcgggttcgttcgtttgcgtttttttttttttcgcgcgttagattagtttgtagtcgtggggttcgggagcgaggcggttggcgaatggagagggaagtttaagtgcgtcgcggttttcgggcggggagcggcggaggtcgggttacgtcgggggagggatttagtcggcgacggtcgaaaatgaatgggggagcggcggtcggggggcggggagggaggagttgaacgtcggggttgttttcgaggagtgttttgtatatttttaggcggaggaggaggagaagcgagaggaggagagacgggaggtcgtttcgagggaagggcggttcgggtgggttggggttgagtcgtagggagtttcgtgggtttggggcgtgtagggtgttgtgtttatgcgtacgagtatttaaagggatcgcgtatacgcgtaaattcggaattttggtgtttttaagcgtgattgtattgtgtgtgtcgcgagtatttgagtgtttttggggcggtaggtgtttttacggtcgcgtggatttatcgagtgtgggttttgtttcgggagttgttcgtgtgggttcgtttgtgtttgcgcgtttttttgtgagtgtttgatattgtttgtttttttcggtgtgtaggcgagagtttacgtaattttttagaatgaagtaagagtttttttacgtaggtaggatgtaggagggagaagttgaggggatacgaagttttttggagattattagaggcggggaaggggcgagggtatagggattaagatatgaaaataaaaagtaaaatattttgtaattagtttgaatgtaggttggggttgttaatatagggtttttttttgaagtagaaaataaagttttcgtatgataatttttatatagcgtatatttggtatgtttgtttattttgttttttttttgatttaaattaaattagtaatgtagatttttagttttttgaagattaggtaagaatagaaagtattaaggttattagatggaggggtaggaagttataggaaaaggtgttggaatatgtaaaagagttagatttagtagaagtgtaggttttagagaggttggagttttgtagttgtttggttttggtgaaattatttattttttaagttttaattttttgtttgtttaatagaataataatatatttatttatttaatagggttgatgtggaattgtaatgagttaatatatgtaaaggtatttagattgtttatgagttaatgtatgtaaaggtatttagattgttttttgatatttagtgagtgtttagtgtatgttgtttgtttttatgattgttattgtatgttttttgtttgttttttaatttaaaggatgataagagagagatgtgattattagggaggtttagaataatttaggagttagtgaattaattggaggaagaggagttttgaaataaaatggaagagaaatgtttgagtgatgaattgggaattcgggaaaaattatttaatcgataaagagaaagggagaaagagaggagaagatatcgagttagttagaatgattttgggttttagaaggttaggattgaggggagaggaaagggagaggaggagtagttagtgtagagttttttagtttttattggaattttaatgaggaggagttagtattacggatagttttttagttataaatttagttagcgatttttattttcgtttggtggaaatttttttttttttttttgggtaatttttttttttttttggtttttggtttaggtttaggttttgaatataggttttttaggttagttttgattttgattttgattacgaagaaatacgtttattatatatatttttttttttatttatcgcggtatgaaattttaggttattattttttgttttttttttttttttttttttttttttttttttttttgtttgtgttttatttttttttttattcgtttttatttttttttttgtttttttattattttttagttgagatttatttttatgattgttagtaggtaatagttgttttgttgataatgtagttttgaaattaatttgagataacgtagttaggtaattttaggtgaagattaaagttttgattgattttttttaattttttttttgtaattaattttttaagatgggttgtggtttatatattttagaaagtggggatttaatgttttggaatattgtttagttttttttttttttattttatttagttaatatttttttaaagaaaaaaagagtttttttagttttaattaatattatatagagagaaagaggagagagaattttgaatttttatcgtgtattaagtattttatttgtaatgttttgaatattattgtttatagttttgaaaatattttgtagtatgaatagataatattattttatttttatggtataggaaattgagttttgaaaaatttgagtatatgttaaattagttatatgttaaaatatagttagtaggtgatggagttaggaatttaatatttaagtttaagtttaaaatttttattttttgggaataatggggaagttttggggtgattggaagtttttggaattttatggggttattgtatttaattttaaatattaatttagatgtttggatttattgtattatttgtgttttattttaatggatgatttagtgtattttgtttttggagaaggaggtgaagattttgtatggatagatttaaggtttattcgagttttatggtttttgagttttgaataaaatgttaatttttttaggttttagtttatttgtatttggtttagtttagtttttttgtttttatgaagaaaggttaagagggttattttaaaatgttttcgaagatattttggttattagaaaagtttttagtgtaaagtatttttaatgatttatggagaatgtaattaaaattatatggataatatttttgtagaaatatatacgggtgggaaaaggtttagaggttaaaaatatattttttttttttttttttgttaaagaaagaatatttaaggtagtttgagatatgtgagaaatgttttgttttttttttggggtgggtgttggtgagtagttgtttgttatttttatcgaatttattaagggtttttatggggaggagttgttaatagattaggatagatttaagaaagaattttttgtttgtagattttggggtgatattaaaataggattttttgtataatggtatttaataagaaaatggaatgttttatagtattttatttatagtatgatagatttgaaaattaatggataatatttttaatattatagattgttttaagaattttattattgttatagattttttttgttgtggaaaatgtattataaaaaattttatataattttatatggagttttattaaatttgtttttgttaattttatttgtgaatatttatttttggattttagttttaggattttagaataggtggtttttttggtttgtaatttgattttagattttataggttgttttatttagatttaagtttaagaaattgtaaagggaaatttagtgaataaattaataaataggtaagtattatttttttttagaaatagataagaaatatagataaatgtttagtgatgaaatggaggttttatttatttttttttaaataaagataagattttgttttgtttgtgtaggatttttagttatttgttattgttttaaaagtttaagtttattatttttgttaaattttaaaggagttaaaattttttaatttggggtgttttgggtttagaataggttgaataattgttgaaagaagtttgtattttttaagcgtttattgattgtgaggtagtatgaaagatttcgagataaatattttgtttggtttttgttttttaggagtttgaaatttattgtagagttatatttatgtttaaataattagaatatattatagaatgtagtaggtatgtttagggtttataggaaatattgaaaagttaaaaggaggaaaattttgttttaatgttaggtataatattttatatttataaatagttatttttttttagttttaaaaatagttgaatttataataattgatatttattgagtgattaatatgtgtgagtaatatttaagttttttatgttttttaattaggttattatgagtttttttttattgaataaaaaacgttggtttagcgtagtggtttatgtttgtaattttagtattttgggaggataaagtaggtggattacgtgagtttaggaattcgagattagtttgtgtattatgaagaaatattttttataataataacgattaaaaaaaaaaaaaaaaaaaaaaaaaaaaaaaaaaaaaaaaattataaaaattagttaggtatggtggtatgtttttgggagtttgagttgggaagatggtttgagtttgggagatagaggttgtagtgagtcgagattatattattgtattttaggttgggttatagagttagattatgttttaaaataaaaatttttatgttttttagttttttttttttttttttaatgttttttttttttttttttttattttgtttttttttttttttattttttttttcgtttttttttttttttttttttttttttttttttttagtttatattaattttgtttgggtaatgtgtttagaatataatttttatttattattttatttatttaaaatttggtagatttttaattgtatattaaagttagaattattttatttagaatttaatgttttttattatttggttttggtgtttttgtgggtttttttgttttttttgtttttttgttttataaatttatttatatttagttattattttgtattttttatgttagtaaaaatgaatcgtttattgtttttttatttttagtttttttttttttgtgtatgttggtttttttatttttaggtttttttttttttagtagtttattatttttgtatgattaaattttatttttttttaaatatttagtttat

SEQ ID NO: 515 - DNA, 9207 bp, Artificial Sequence
  chemically treated genomic DNA (Homo sapiens)
aagaattaagttaagtgtttttttacgtttttaagaggtatttttttgttagaattggggtaatttttatggcgtttagtgagaattttttagaagatgagggttggtgttttatgttttaagagttaagagtggaggtgttggtttttttttggttttttaatttgtattaaaggggtatgttttaggtggtgattattggaatttagaggtaaaggtagtatttgtttggagtagagaatacgaggtgaggcgggatgattttatattatagttatagataagaggtattaatagtttagtcggtttgaaagagatatatttaaagttataaatgggaagacgtgggtggaaagttttgtagtaattggaaagttattttattaaagacgtgttataatttaaaaatattttaatttttgaatgatttttttatatatttgtttaagtcggtgatattatttagttttaatattttaatttaagttttattttgttattaaaatgtgagttaagttaatttaattatttgttagattgattggtataggaatgattaatttttggtttgtgtgaagattagtggtttagttttttagttagtaaaatatataagtcgatgtattgaggattatttagttttatgtatattgttggaattattttgtgatttagataaaaatatataattataaaattatatatttgtatacgtttgatttagtttagatatatttatttagggattattagttttatagaatataacgggtcgttattattattttggttgtttagatttgtttaaagtacgttattgtgtagtttgatattatggtggatttttaagcggtttatatttttttagagtattgttttataagggaaaatgattgtgttagggtggtagtgtgttggacgagggggtaggaggtttggagtgtggttttagttttgttaggaaataggtatttgattttgggtaaggaattgattttttttgggttttagtttttgtattttataaattagagttggtttgagttattagttttttgaagttttttttagttttaaaatttaatgttttattttttcgtttttgattattaaaggtaagaaaaatatagttaaagatattatggtttttattgatagtattgggattgattttatattttgttgttaattaaaagtgttagtgtagggtagtagtgattagcgatgttcgtaggagattaagatttttagggttaggggatttgttatttatttattatatatttaatgatacgttagatattgttttaagtgtttgggagatattaatagagggaggtttcgaggggtttataggtggtttgttagggaatggttgggcgggatttgattttaggtagtttgggtttataggttgttttttagaggtgaagacggtagttttagttgggtaattatgtttttatgtttatagggagtgtaagggataaaggaggttgataaggagtagaaggaattagaaaggagtattagtaacgtttttgattattagtagaatattttatttgttattttaaggaattttatagaaaagattagatattggttaatttttgtataatttgggtttattttgatggagtaggaggtagttttacggttttatatttgtttaggatttttggtagttgggttagtttgtaaatgggtaaggttggttggattcggaggtgggcggaagtgtgggttaagtttattaagtttttgattttaatatatattagtgaaatagttattattgttagatattttagtaggttagatgtaggcggtagtttatatatgaggaaatgatttttatttttaggtttatttttttttttttttattttttattaaagttttattgtgtatgtgattttaattgaattgtgtattttatttttattttttgagggcgggaattaattaagttttaattatatttgtttttttagtatttgattttgtgtttgttaagtgaatgaatgatgtatttcggattaaatgacgtttgtttaatttgtaattggaaattattataaattgtttgttgattattgatttggattttaaggtaaatatagatatgtttttaaggagacgtttttgtgtgtgtttttttttaaaggatgatttcgtaagttagttaattattttttataattatgtttggattttaaagaattttttttttgtattttattttttagatattttatgttcgtaatatatatattttattgtaatatttttttttttttttttttttgtgaatgttttttttttttaaggggaaagtgttaatattgtttataatttagtttgttatagcgtatttgattattttattttgtgtattttttgatttttaatttttttttaatattttcgatttttgatttttaagtataagggttatatttttatttattaggtttaatttattgtaaagtttattgttttttgtgaatcgtacgataatagttaatgaataattattggttttagttagattgttttttaattttgttgagtaattggtaagttaattagtattaaggataaaaatgtaaggaattttgatattgttttagaattaggataagttattttattatgaatatgtgattgttttcgtgtagaggtggattagttatagggtaggatttagggtaagggggttgtttggggtagttttagattttttggaaggggaaatagggaggattagggatttgggtgggaggtaggagtttaggtttacgatgattttagtatataggtttagttttttttttttatagtttttttgtcgttttagttttgttatttggtttttcggtcgggattttttttttaaggtttttatatatttaaattcgcgaggggtaggattttttttttttttttcgtgtatatgatagtttttttaaaatgttttttataaaattttttttgaggagagtttggaaaaagatttttaatagttagattattttgagtttttttttattatgtatttaatattttaatatattttgtatatttggttttatgttatttgttatagttttaaggacgtaggttttataattattttttattttgtagaggaggtttaaggttagtgagtagaggaaggttttattgtcgggaatcggtggtttttaaatttttgtgttttttttttgatatttttttgtttatatatgttggaaatagtttagtatgagtaaagtattattttttagtttttagtttgtgttagttttgtaaagaggaaatatggttttatttagggagtttattagcgatttagggagttttggagtatttggtatttagtatttatgaatacgagggtaggtatggtgggataaggtagtttgtttggggtaagtgagtttcgggaagtagttgagttttggggagtagttgtttatatttagttttttagggttgtgtaagtagtttgagggagaaagattttatattagttgaaattgtagtttagatgagttagtattttttgttacggttttttaaaaaaatagtaatatatttatgtttttatggtaatttattatggatttgtattttatttatggaatttttttttgatttatttgtgttttttaatttgggtttgaatatatattgagaagttattagaattaatttagtttttaagaaataattattttttttatacgtgattgttttagtcgtatagattttgattgtgatttatgttacggtgatattcggagattttcggggatttagaaatattaaggtgtatcgatattttaattattcggataattttagatttagagttattatggaaatttagaattttgagttatagagaagttgggttattttttttttttttcggtggtgtcgtagtttttgagatgtgagtagtttttagtttcgtggtttcgtttaagttggggttttttattttatttataattttaggaatttaaatttttttgtaaaatattgagtatgtgatttgagtttaaatagttatggatttaagtattttttgataaaaacggaaattatagtgtagggggtggttttgattagggtttcggagttagataaatttaggtttttattttgaattttttattaatttgacgtggtaggttatttattttaaggtttagtttttatttgtgtaaagtgggagtcgtaagtttttcgagagtgacgatgatgtgcgtggagtgtttagtttagattgaagcgcggttaaggcgggtcgttatttgggtatcgtttagttttagagggcgttattttcgcggagtttgcgggatcggggtttttcgggagtagcgcgattagtattacgattcggggatatagttagggttcggtttttataggaagcgttttatttggagtttttttgtgatagaatgattattagttttaagtttatttagaggtttaagaatggggtcggtttaattttagggttttattatttaagttcggttgtttttcggtgttattagtattattgtttcgtcgttgcggaattttaaaggtaggtttggcgttagggttttggttttagagaggacgtcgagcgttttacggaaagttttcgttcggtttttagggcgtatattcgcgcgtacgtggggtcgaggttttgttttcggggttttagggttagtcggcgagggatttagtcgagtgatagtaggaggcggagggaaggttgggtcggaaggtgttagtttcgtttcgcgttttttcgtcgttttcgtttttttttttttttttttcgtgcgttttttttttttttttttcgtttttttaatttttttgttgttttttttttttttttttcgtttttttttattttgtttatttttttttttttttttttttttttttttttttttttttttttttttttttttttttttttcgttttttttttttttttttattcggtcgttttttttttttttttttttttttttttttttttcgtttttgaagagcgcgtcgcgtgggggacggttcggttattttttttagagattgacgagtgcggtgtcgttttagtttagagttttcggagtcgttcggttagcgttcggtttttttgatcgtttttggtcggcgttttcgttttcgttcggcgcgtatcgagtagtcgcgggcgtcgagtagttatcgtttcgattaagcgtcggttttgttcgtagcggtagggtaagagttgggttcgtagagagcgttcggcgcgcggttttagttttatggagggttattcggggtttgggcgggggtcgcggggggtattgatacgtagatttcggggcgttgtcgggggtgtaggtgggggtggcggttgttgcgaggattttaggggcgcgcgtttgagtttcgcgtcggttcgtttttcggttatggagtggttttcggggttggcggggtcggtcggggggtttttgcgtgttagggtcgttgttttcggggtcgtttagcggcgggcgcggttagggcgcgttggtttgtttcgttcgtttttgtttttaaaaggaaacgtaggtttggtagggggttttgtttagtggatgtttcggcgaatatgatttcgcgaacgggagtgggggtataggagagcgtgttcgaggtggtttggcgtttcggttttgagggtgattttttggagcggcgtcgggttcggaggatttggggcgtttaagatatttgaaggttgcggtatcgcgggaatttgcggggcgcggggtgttatggttatttgttcgtcgcgtttagggttcgggttggggatttttcggtcgtgcgaggagagcgtggggaatttgtcggaaatgagatttggttgcgttgggttgtttttattttttcgtttttatagtatttgaatgaagaggtaattgagtgtttgtttgtgtgtgtttgggttgcgtgtgtgttattttattttattttttacggtaggagattttttatgttagtttgtatataattttagggtagtttaaaatagtagttgacgcgttagttatttagaaagtaaagaaatgagtagttttttttggagataggagtaatttattttaattcgttagtaagagattatatttgttttatataatggaagcgtttgtgcgttatttgtttgtttatattattattaattagagagataaatttttacgttaagttttattaaaattttgagtagtagcgtagtatagtaaatgttagtatcgattattcgtagggaaatgtttagatatttatttttgggattagttatttatttttttaaattgatcgtttttaaagcgaaaaaagtaaattatttttaaatgtgtgttataaggttgtgttgttttttttttttgtttgtttttaaatttatttaaataattttatataagtgattatttgttttaataagggtattgttgttaggtaaattttttttgtttttaaatgtaattatttttagttgttatatttttgttttttatttttttttttttttttttttggtttaaaagtagcgatttattagtaatattaaatttgaaattgatttatgtggaaaaatttggtttgtttgttatttaataagttttgttgagtaaaataagtaagtttaaatttgattagttgtgtgtttgtttgaaattatttagtagagtattttaattttgtatggtttttataaaatttattaaaagttggataataaaagaattttattttgtagttagtaattatagttttttatgtgggagtggtaggttgtttttttttttggtatttgtatataaaagttggggagagtttttttattgttttttatatttattttttgtttattttagagaagttgaaaaatagaattaagttagtaagtagtttgtaagtttaaggaagaaaaagagttgatttattcggttttggatggataattggtaatatttaagatgtttatgattttggttttttgtttgaggtttgtttatttttttaattagtagttattaggatttattttatgtagagaaatgatataaagttttagaggaaggagtattttatattggaaggagtagtgagaagggtttgatttgataatattaggatgggtgggaagggtttattttttattatttatgttttttcggtatagaggattgtgtggaggatttaggatttaggattatatttaattggggtttgatttttattttgttttgcggtggtttttttggtagttatgtggattttgggtagattgtttatgttgttgggttttcgttgttttattgtatgacgtttgttttttagggatgtaggaagatttaattaggtaggagtggatggttttttagtacggggtttagtttttagtaattaggtattttggtaatggtagttattaataggagagattattgattgttgagtgaatataagtggtataatttattaagtggagattttgagtgaatgtggttattttggatttaagattgttgtttttttttgtttttttataggattattatttattgttagtgttgattagtttttgttggttattatgattattatttgtatttcgagtgttttaatagaattttttgatgtttttggttttatttgttgttttttagttaagaggggtgtgtgtgtatgtgtgtgtgtgtgtgtgtgtgtgtgttgggtgtgtgttgggtagtagggtttttggaaggtttggtttagttataatgttgattataaagagaaaataagaaaataaatgtaaattaaatagttcggtgagtttttgttatttcgttatatttagtaagttttattagttgaatgttgtttgaattatttaaaaagtttttagttgtaaataggtaagagtatttagtggaggttatggagttaggtttagagttttgttattagtttttagttttatagttatgaatttgggagggtaaggaattattttagaggtgaaggttatttatcggtgttaatttaaggtttttgaaaatgagttttagttattttattatttaagtattttttttattgatatgtaatttatttggttgaataattatattttagagttttaaataaatttttagtttattatgttattgtttaattataagttttattgtaatagttatgttaaaaataataaagtcggtgaaattgattttagtgtattttaaattaatttaatatattcgaaatattatgtatgtataaaaattattgagttttttttttttttttattaagtttttgagagttagtgtgtatgtgtggatttgtattagttattggttgagagttttgtagttatatatggtaagtgggtattatattgtttagtttaggtttagtagaagattaagatttagttagaggaagtaaggtagattcgtgtttggaattagttttttttgaagaagtgtatagttaagtaatatataaagtagaaatattttgagttttgtatttaaagtaggaagatttgggattatgtaagggggtttggtttttagttttttttttgattttttttttgggtgtgtgtttttttatagtttggagagtggaagggaagagagggggttttttggattttttttttgtttttagaaatgatttttgtagttgttttgaagtttttaggttaagttgattgtgtttagagtagataggaggcggtttattgttttattgtatttatttaagtatttatttaagttggttatggaaatgtgaatgaaaagtttgatttaggtttttttgttttgttaatttagtaaggaggttttgattagttagttagtaagtgattttttttgtgatatttaagtggaatttagtgaggaattagtattattatttaattattgaaatagtatattttattgtgatattgagaaatgttttttttttgagatttttgggaggatagttatttaaataagaattttttgtatttatttttgaattatttgttagttgtagaatttagttaggattaagttttgatgttattaatgatgagtttagtgtatttaattttttgtttttttgatttttttttttttttttttaaga

SEQ ID NO: 516 - DNA, 9207 bp, Artificial Sequence
  chemically treated genomic DNA (Homo sapiens)
ttttaaaaaagaaaaaaaaaaagttaaagaggtaaaagattaagtatattaaatttattattggtggtattaagatttgattttggttgagttttatagttaataggtaatttaaaagtgaatgtagggaatttttgtttaaatggttgtttttttaaaggttttaagaggaaagtattttttagtattataatgggatatgttgttttagtgattgaataataatgttgattttttattgaattttatttagatgttatagaaaaagttatttgttggttggttggttagagtttttttgttgggttagtagggtaagagggtttgggttaggttttttatttatatttttatggttagtttaggtgagtgtttgggtgggtatagtggggtagtgggtcgttttttgtttgttttggatataattagtttaatttgagagttttaggatagttgtaggggttatttttagagataggaaaggagtttaggaagttttttttttttttttttattttttaggttgtaagaaagtatatatttagggaagggattaaagggagaattgaagattaaatttttttatatggttttagatttttttgttttgaatatagagtttaaaatatttttgttttgtgtgttgtttggttgtgtatttttttaagaggaattgattttaagtacggatttgttttattttttttgattgagttttaattttttattaggtttgggttaagtaatatggtatttatttgttatgtgtggttatagagtttttaattagtggttagtataaatttatatatatatattagtttttaaagatttagtggaaaaaagaaaaaagtttaataatttttatatatatataatatttcgaatatattaggttaatttgaaatatattgaaattaattttatcggttttattgtttttaatatggttattataatgaggtttgtaattggataatgatataataggttgaaaatttatttggagttttaaaatgtaattgtttagttaggtaagttatatattagtaagaaagatatttagataatagagtaattaaaatttatttttagagattttgggttagtatcgatgaatggtttttatttttagggtgattttttgtttttttaggtttatggttatggaattgaaggttggtggtaaagttttaagtttagttttatggtttttattgggtgtttttatttgtttataattgagaattttttaagtaatttagataatatttaattgatagaatttattggatgtggcgaaataataaaggtttatcgaattatttaatttgtatttatttttttgttttttttttatgattaatattatggttaaattagattttttaagaattttgttatttaatatatatttaatatatatatatatatatatatatatatatatatatattttttttggttaaaaggtagtaggtgaggttagaggtattagaaaattttgttaaaatattcggagtgtaggtaatgattatggtagttaataaaggttggttagtattggtaataaataatagttttatgagaggatagagaggggtagtagttttgggtttaaagtggttatatttatttagaatttttatttggtggattatgttatttatatttatttaataattaatagttttttttattgatggttgttattgttagaatgtttagttattaagagttaagtttcgtgttgggggattatttatttttatttaattgaatttttttgtatttttgagaggtagacgttatatagtgaagtaacggaggtttagtaatatggataatttgtttaggatttatatagttattagaggggttatcgtagggtaaagtggagattaaattttagttgagtatggttttaaattttgagttttttatatagttttttgtgtcgggagaatatgaatgatgaggaatggattttttttatttattttgatattattagattaggttttttttattattttttttaatgtgaaatgtttttttttttagagttttatgttatttttttgtatgaaataagttttggtagttgttgattaaagaaataaataagttttaaatagaaggttaaaattatagatattttgggtgttgttagttatttatttagagtcggatgggttagtttttttttttttttaggtttgtagattgtttgttgatttgattttgttttttagtttttttgagatggatagagaatgaatgtggaaggtagtggaaaagttttttttagtttttgtgtataaatattaggagaaaaggtagtttattatttttatataaagagttgtaattattagttatagaatagaatttttttgttgtttagtttttaatgagttttgtaaaaattatgtagaattaaagtgttttattaaatggttttaggtagatatataattaattaaatttaagtttgtttattttatttaatagggtttgttagatggtagataagttaagtttttttatataaattaattttaagtttggtgttgttgatggatcgttgtttttaaattaaaaaaaaaaaaaaaaaaggataaagagtagaaatgtaatagttgagaatggttatatttaaaaataaggagaatttgtttgataatagtatttttattggaataagtaattatttatgtaagattatttagataaatttgaaaataaataaaaaaaagaaataatataattttgtaatatatatttgaaggtagtttgtttttttcgttttgaaagcgattagtttagagagatgaatgattaattttagaaatgagtatttgagtatttttttgcggatggtcggtgttaatatttattgtgttgcgttattatttagaattttaataaagtttaacgtggagatttatttttttgattggtggtggtgtgggtaggtagataacgtataggcgtttttattgtatggaataaatataattttttattggcgaattaaaataaattatttttgtttttaaaggggattgtttatttttttattttttaaataattagcgcgttaattattgttttaggttattttgaaattgtgtataggttaatataaaaggttttttgtcgtaaaaaataaaataggataatatatacgtaatttaaatatatataagtaaatatttagttatttttttatttaaatgttgtaggaacgagaaaataaaggtagtttagcgtaattagattttattttcgataggttttttacgtttttttcgtacgatcgaggggtttttagttcgggttttggacgcggcgagtaggtgattatggtatttcgcgtttcgtaggttttcgcggtgtcgtagtttttaggtgttttgggcgttttagatttttcgggttcggcgtcgttttaggaagttatttttaaagtcggggcgttaggttatttcggatacgtttttttgtgtttttattttcgttcgcgaaattatgttcgtcgggatatttattgggtaggattttttattaggtttgcgtttttttttaaaaataaaagcgagcgaaataagttagcgcgttttggtcgcgttcgtcgttaggcgatttcgaagatagcggttttagtacgtaggaatttttcggtcgatttcgttagtttcggaggttattttataatcggaaaacgagtcggcgcggaatttagacgcgcgtttttagagttttcgtagtagtcgttatttttatttgtattttcggtagcgtttcgagatttgcgtgttagtgtttttcgcgattttcgtttaggtttcgggtgattttttatgggattggagtcgcgcgtcgggcgttttttgcgggtttagtttttattttgtcgttgcgggtagggtcggcgtttggtcgggacggtggttgttcggcgttcgcggttgttcggtgcgcgtcgggcgagggcgagggcgtcggttagagacgattagggaggtcggacgttggtcgggcggtttcgggagttttgagttggagcgatatcgtattcgttagtttttggaggaagtaatcgggtcgttttttacgcggcgcgttttttaggagcgggaggaggagggaggagggaggaggaaggagggacggtcgagtggaggggaggggaggaaacgagggaggagagaagagagaggggagggaaggggaggagagagaagaggaggggaagggaggtaggtaggatggggagaagcgggaggagagggaagggggtagtaggagggttgggggagcggagggagaggagagggaacgtacgaggggagagaagaggagggcggaggcggcgagggagcgcggggcggggttgatatttttcggtttaatttttttttcgttttttgttgttattcggttgggtttttcgtcggttggttttgaggtttcgggagtagggtttcggttttacgtgcgcgcgagtgtgcgttttgggagtcgggcggagatttttcgtggagcgttcggcgttttttttggggttaaggttttaacgttaaatttgtttttggaatttcgtagcgacggagtagtggtgttggtggtatcgaagggtagtcgggtttgggtaataaggttttgaaattgagtcgattttatttttgaatttttgaatgggtttaggattaatgattattttattataaaaaggttttaaatgaggcgttttttgtagaaatcgggttttggttgtgttttcgagtcgtggtgttgatcgcgttgttttcgggaagtttcgatttcgtaggtttcgcgggagtggcgttttttggagttgagcggtgtttagatagcgattcgttttggtcgcgttttaatttgggttgggtattttacgtatattatcgttattttcggaggatttgcggtttttattttatataggtgggaattgaattttaggatgaataatttgttacgttagattgatgagaaatttaaggtggaaatttgagtttatttgatttcgaaattttggttaaaattattttttatattgtggttttcgtttttattagaaggtgtttgagtttatggttgtttggatttaggttatatgtttaatattttgtaggaaagtttagatttttgaagttgtggatgaaataggaaattttagtttaggcgaggttacggggttgaaagttgtttatattttaagaattgcggtattatcgggaagggagaggaatggtttagtttttttgtgatttagggttttaggtttttatggtgattttaggtttagagttattcggataattgagatatcggtgtattttaatgtttttgggttttcgaaggttttcgggtattatcgtggtatgagttatagttagaatttatacggttgaaataattacgtataggggaagtgattattttttggagattgaattgattttgatggttttttagtgtatatttaggtttagattagagaatatagataggttaagaaagagttttataaatggaatatagatttatagtaagttattatggagatatgagtatgttattatttttttaaaaaatcgtagtagaaaatattgatttatttgggttgtagttttagttaatatagggttttttttttttaggttatttgtatagttttgagaagttgggtatagatagttgttttttaaagtttagttatttttcgaagtttatttgttttaagtagattgttttgttttattatgtttgttttcgtgtttatgggtgttgagtgttaggtgttttagggttttttgagtcgttgatgggttttttgagtggagttatattttttttttgtagggttggtataggttgggggttaggaggtggtgttttgtttatgttgggttgtttttaatatatatgagtagaaagatattaaaagaggagtataggagtttgaagattatcggttttcgatagtggaatttttttttgtttattaattttgggttttttttatagaataagggatgattatggaatttacgtttttaagattatggtaaatgatatagaattaaatgtgtagaatatgttagagtgttgagtatatggtagagaaggatttaaaatgatttagttattaagaatttttttttaagttttttttagggaggattttatagaaaatattttgaaaaaattattatatatacgaaaaaaaaaaaaaaagttttgtttttcgcgggtttaaatgtgtgaaagttttgggaaagggatttcggtcggaagattaaatggtagagttaagacggtagggaggttgtgggaagaggaagttgggtttgtgtgttggggttatcgtaagtttaagtttttgttttttatttaggtttttggttttttttatttttttttttaaagagtttgaggttgttttaagtagtttttttgttttgggttttgttttgtagttgatttatttttgtacgagggtagttatatgtttataataaaatggtttattttagttttggggtaatattagggttttttatatttttgtttttaatattagttggtttgttagttatttagtagaattaaaaagtagtttggttgaagttagtgattatttattgattgttatcgtgcgatttatagggaataatgagttttatagtaaattaaatttaataaataaaagtatagtttttgtgtttggagattaaaagtcgagggtgttggaaggaaattaaaagttagaaggtgtatagggtggagtgattagatgcgttatggtagattgagttatgagtaatgttaatattttttttttaagaaagagggatatttatagaagagaggaggaaaagggatattatagtagaatatatgtgttacgaatatgaaatatttagagagtaaaatgtagaaaaagaattttttagaatttagatataattatgagaaatgattagttagtttacgaagttattttttgaaaaaaaatatatataaaaacgtttttttagaaatatgtttgtatttattttaaaatttaaattagtagttaataggtagtttgtggtggtttttagttgtaagttaaatagacgttatttggttcgaagtgtattatttatttatttagtaaatatagagttagatgttgagaagataaatatgattaaggtttagttagttttcgtttttaagaagtaaaagtgaagtgtatagtttagttaaaattatatgtatagtgagattttggtaaggagtggaggaagaaaagaatgaatttagagatagaaattatttttttatgtgtaagttgtcgtttgtatttggtttgttggggtgtttggtagtggtggttattttattgatatatgttggggttaaggatttgataagtttaatttatattttcgtttattttcgaatttaattaattttgtttatttgtaggttggtttagttattaagaattttaggtagatgtggggtcgtggagttgttttttgttttattagggtggatttagattatgtaagagttggttagtgtttagttttttttgtgagattttttggaatggtagatagggtattttgttggtggttaaaaacgttgttaatgtttttttttaattttttttgttttttgttagttttttttgttttttgtattttttgtgggtatgaagatatggttatttagttagggttatcgtttttatttttgaagggtagtttgtgggtttagattgtttggggttaaatttcgtttagttattttttagtaggttatttgtgggtttttcggggtttttttttgttaatgttttttaagtatttagaatagtgtttggcgtgttattaagtgtgtgataaataagtagtaggttttttggttttggaagttttggttttttgcgggtatcgttgattattgttgttttgtattggtatttttggttgataataaggtataaaattaattttagtgttgttaatgggaattatggtgtttttgattatgttttttttgtttttggtggttagaaacgagaaaatgaaatattggattttaaaattggaaaaaattttagagagttgatggtttagattaattttggtttgtaagatgtagaaattgagatttagggaggattaattttttgtttagggttaaatgtttattttttggtaaagttggggttatattttaggttttttgttttttcgtttagtatattgttattttgatatagttatttttttttataaggtagtattttgggagggtataaatcgtttgaaaatttattatgatattaaattgtatagtgacgtgttttaggtaagtttgaataattaaaatagtaatagcgattcgttgtattttgtaaaattgataatttttaaataaatgtgtttgaattgagttagacgtgtatagatatatgattttatagttgtgtgtttttgtttgaattataaaatgattttaatagtatgtatggaattgaataatttttagtgtatcggtttatgtattttgttaattagaaaattgaattattagtttttatataaattaagagttagttatttttgtgttagttagtttagtaaatgattaagttagtttaatttatattttggtgataaaataaaatttggattaaagtgttaaggttgaataatgttatcgatttaagtaggtgtataaagaaattatttagaagttggaatatttttaagttataatacgtttttggtggaatggttttttaattgttgtaagattttttatttacgtttttttatttatgattttaagtgtgttttttttagatcgattgagttattagtattttttatttatggttgtggtgtagagttatttcgttttatttcgtgttttttgttttaggtaaatgttgtttttatttttaaattttagtggttattatttgggatatgtttttttggtgtaggttgaagaattagaggagggttagtatttttatttttagtttttaaggtataggatattagtttttattttttggaagatttttattgaacgttatgggagttgttttagttttagtaaggaaatattttttaaaagcgtaaagaaatatttggtttaattttt

SEQ ID NO: 517 - DNA, 6050 bp, Artificial Sequence
  chemically treated genomic DNA (Homo sapiens)
tatttttttttgttaaaaagttaagagttgtttagaaggaaaaaatagttttttttaaagaggttaaatttttagtattaattagttgtagtagtggtatgtgtgtgtgtgtggggggggggtggtatggtaattttgtgtttttagtgttttaaataggggtaatttttttgtttacggtttgagttatcgaatgagtaatttcgattttttaagattttttattgggtttacgtgtgtgtgagttttataggaattgtggaatgttttttttttttgttgggtttagatatttagaatgaataaattaaagggtagtggtaatatggttattgttattgtagataatgtggtatttatatatgggtattagttgttttttttatggggtttaggaataagggtaagtttgattttttattatgaattattggggtgttttttatatatagaggttgtattagttgaaaatagtttaaatattttgtaattttgttttttttaatttttgtttatttatattttagaataaaagagtttgtttagtttttttaaagatttaaagaatattatttatttgttttttaagtatttaaaaagtataatcgtttatatttattttggttggatgaggatatgtatttatttatttatttaagagatatttattgttagatttggtggtttacgtttgtaatttcggtattttgggaggtagaggtgggaggattatttgaggttaggagtttaaggttagtttgggtaatatagcgagattttatttttataaaaaataaaaaattagttgggtatggtggtatgtgtttgtggttttagttatttgggaggttgaggtaggggtattgagtttaggagtttaaggttgtagtgagttataattatattattgtattttagtttgggtaatagagtgagattttgttttaaaaaaaagaaagaaaaagaaaaagaaaaggggtatttattgaatatttattatgttttaggtattgtgttagattttaagtgaatattagtatatgaataagataaaggcgaaaagttattaaataagtttaagttgatttcggtatatgtatttttttgatttttggtttcgtgttttgattataattttttattattagattagatttttttaaataaataattatttttgtatgttggggatgggttgtgtgcggtagtatttacgtaggcggtatagatagtagttttttatttaatgttgtaataatattaggttaaataatgtgtattgattttaaaagtgtggggttaggttttttttaagtgttatagggagagtgtaaagtaggaaaagtttatcggatgaggaaatattgtagagggaaagtgaatttttttttaatttgggttaaaatttagatgtggaattttatttttttttttatttttggatttttagataggaggaatttagtatatagataattatgaattatatatattttggttttatatgtttagatttgtttagagtatgaaatttttgttttgttggaaggtagcgtcgtgtttacggaggtatataagtatttgttttaaagttattttgatttgtagatttgtaaatggtaaaaataattttatatgtttgttttgatttgtttttatttttaggttattttgtgtgagttttattttttagaatgtgattttgtagttttgaaatggatattatgagtagattgagatgtgagaatatgttagaatgattataggttcggatgttagtggggtaggagagggagtttgagattgtattggtttatattgtggtttttggttgagtatttggtttgtttggatgatgttttggttttatttaatttttattattttattatttagaggatagaggatttgagttttatttttgtattgtagttattttttttgggatttgtttttaagtttttttttgtgttgtttggtattttttttttattttttttaaattatttattgttattttgtaagttcgattgatttgttggtttttttatgagattggaatttttttgagggtcgggataggtttattttttttattatagtgagtattagtttttagtttagttaatagttttgttaaataaataattgaataaaattatttgttaaataatggtttgttttttttagaggatggatttagtttgttttttttagaggatggatttagtaagtttttaattttggttataatggtgttagaaggaaagagttaagttatttggaggaaataggtttatttaaagatttttttttttttttttttttttaattggtaaaggtaggataagtgtatttgagataaattttggatataaaattttgatatattttttaggtattggtcgagatgttttggatttgaaagggaagtaaattaaattattttaggtttttttttttttttttttggagatagaattttgttttgttgtttaggttggagtgcggtggtacgatttcggtttataggaatttttgtttttcgggtttaagtaatttttttgttttagttttttgagtagttgggattataggcgtgcgttattatattcggttgttttgtatttttagtagggatagagttttattatgatggttaagttggtttcgaatttttggttttaagtgatttattcgtttcgggtttttaaagtgtaggaattataggagtgagttatcgtatttagttaggttttttgttaagtggtttgagatttagttgtgaatggtagttatggttagatttaggaatttaaagtttgatttattttgtttgaagttaatattaataataagagagatgtatttggttttataatttttttttttttcgtttttttttttttttttgtaattaaggatagaattagaagtatcgaaggtcgtagaattgttttaggatttagagtagttttaaggaatttgtgtttacgtattatgtgtgttttttcgtttttttttttttttatgagtgagaaaaaaaagcgtttaaatttttattaatataaattaatgatatataatgatgaaattttgtttttatttttgtttgtgatagggaatgtaaaaatagtaagtggtttagttttacgaattttcgttttttgtttttttcgtttttgtcgggttggatttttaagaatggaggttagcgtatagtttcgcgcgggtcgtttagttttcggattcggcggatgatgttaggcgacgggagcggtcgcggtcgggtcggggaggtcgcggtttaggggagttgggagggagggtggtttcgttaggtcgacggcgcgttcggtcgcgcggcgttgtttggagacggttttggcggcgttgtgttgttgtaaatagtcgtttttttgttattatttatagtaggattttttggttttcgggcgcggcggttggaggtaggtttgcggttcggtttttcgcgcgtttcgaattattcgttcgtcggttttattttgtttcgtttttttttaggtgtttatcgcgggtttcgattttcgggttcgaagagtggagaagggaagatcggggttgtgcggggatatgcgttttcgcgttttggaggtggttagcgcgttggggttgagtttcggtagcgtgatttcggttgttttacgtagtagggtaggagattggggggcgtggtatattttggagtattttgtttttttaaagtttcgtgttttaggacgtggagtcgtttttggggttttagtagtcgaggtatttcgtttaggcgtagttggatattgtttttttagttttcgttttttattttttaagttcgcgttggaaaattattcgttgcgggttttcgtaagtatagttttttggcgggatcgaattagtttttagcgtagatttgagtttttcgtaggaagtatatttcgttttgttatttcgaattgattattttgtttatataattatatttcgtattttttatttttggggtttagtttagaatcgggtagatattttttttaaatgttttcgtacgtaggttttgtatagtgtttatttgttggtgttttagggatttgatagtttttttaatatttttatatatggtcgagaaaaataaataaataaatgcgttgttttttttaaaaaaataaataaataaagtatttagtatcgtaaagtaggttatcgtatttttttattttggattttttattttttgtttttaaacgtaggaatagtgttagtattgttcgagttcgagggttggaggttaggggatgaaggtttgtttttacgttttgtattgaattagggttagaattggggatgggggtaggggcgtattttttcgggagtcgaggtttaagttttcggggttttgtattcgatgtcgttttttttatttttgagttttagaattgtttttagttttcgtataagggtaaaaaggcgttttttgttttatttttttcgatttcgggaataagggttcgtattgaattaggtgcgaatgtttttttttattttgcgtcgttttcgtttttttttttttagtcgcggttttcgttttttttcgtattgtattttcggtgttggttgtagttcgcgagtagttttcgttaatttttttttttttatataggatgtttatattaggatatttgcgttagtaggtttttacggtttttttttgtagttttggggggagttattttcgaaattttttattttggggggtttacgagatttttgagataggaattgcgaaatgtttacgagattaggatacgcgttaaggcgggggtagggagttgcgagcgttggggacgtagtcgggcggtcgtagaagcgtttaggttcgcgcgttatttttttggcgttatcgtggttgagttcgtgacgtttatatttatttataaaacgtttgttataaaagtagtggttgcggcgtttcgtattttaatcgtatttgtagcgagtatttgagaagttaagattgagtcggcggtcgcggcgtagcgaacgagtagtgatcgtgtttttatttagttttgttttatagcgtttatttgttttcgtttttcggtttttcgttcggttttgtttaatcgttacgatgatgttttcgggttttaacgtagattacgaggcgttattttttcgttgtagtagcgcgttttcggtcggggatagttttttttattattatttattcgtagattttttttttagtatgggttcgtttgttaacgcgtaggtaaggttggtttttcgtcgtcgcggggtcgggggtttggggtcgcggaggaggagatatcgggcgggacgttttagtagatgagtagggggtttttttgtgtttggagggaggttgtcgtggtcggagcggtgtcggttcgggggttcgggatttgttttgagcgtacgtacgtttgttatagtaagaattggtttttttttcgggaggtaggttcgttttgagtaatttttggtttgtattttaggacggatttttgatattagttggagtagacgtgttttaagtataaattcgttaattagagtttggttttttcggggaggtggtagaaagcggtaattttttttttttcggtagtttggagtacggaggagggatgagggaggagggtgtagcgggcgggtgtgtaaggtagttttattgataaaaagcgagtttattttggagatttcggagcggcgtttgcgttagcgtagacgttagggatatttataataaatttttttttaagtaagtgatgttgaagggataacgggaacgtagcggtaggatggaagagataggtattgcgttgcggaatgtttgggaggaaaagggggagattttttatttaggatgagggatatttaagatgaaatgttcgtggtaggatcgtttttttttattgttgtatgcggtattgggaattcgttttatttgtgttcggaatttgttcgtttacgtcggttttttttttttgttttgttttagg

SEQ ID NO: 518 - DNA, 6050 bp, Artificial Sequence
  chemically treated genomic DNA (Homo sapiens)
tttagaataaaatagaaggggaaagtcgacgtgagcgagtaggtttcggatataggtggggcgagtttttagtgtcgtatgtagtagtgaagagaaacgattttgttacggatattttattttaaatgttttttattttggatgaaaggttttttttttttttttttaggtatttcgtagcgtagtgtttgttttttttattttgtcgttgcgttttcgttatttttttagtattatttgtttgaaagggggtttgttataaatatttttgacgtttgcgttgacgtaggcgtcgtttcggagtttttagaatgaattcgttttttattaatgaaattgttttatatattcgttcgttgtattttttttttttatttttttttcgtgttttaggttgtcgggggaggggggattgtcgttttttgttattttttcggagaagttaggttttagttagcgagtttgtgtttgggatacgtttgttttagttaatgttagagattcgttttggagtgtagattagaggttgtttagaacgaatttgtttttcgaagggggaattaatttttattatggtaagcgtgcgtgcgtttagagtaagtttcgagttttcgagtcggtatcgtttcggttacggtagtttttttttaggtataagggagttttttatttatttattggagcgtttcgttcggtgttttttttttcgcgattttaagttttcggtttcgcggcgacgggaagttagttttatttgcgcgttgataggcgagtttatgttggagaaggagtttgcgggtgagtggtagtaagagaggttattttcggtcggggacgcgttgttgtagcgggaggatgacgtttcgtagtttgcgttgaagttcgagaatattatcgtggcggttaggtaaagtcgggcgaggggtcgaggggcggagataggtgggcgttgtggagtagagttgggtaggagtacggttattgttcgttcgttgcgtcgcggtcgtcggtttagttttggttttttagatgttcgttgtagatgcggttggagtacgaggcgtcgtagttattgtttttataataagcgttttatgaatgagtgtaaacgttacgggtttaattacggtggcgttagaggggtggcgcgcgggtttgggcgtttttgcggtcgttcggttgcgtttttagcgttcgtagttttttgttttcgttttggcgcgtgttttaatttcgtgagtatttcgtagtttttgttttagaggtttcgtgggttttttaagatgaggggtttcggggatggttttttttagggttatagggaaaggtcgtggaaatttgttgacgtagatgttttaatatggatattttgtgtaaggggggagggattgacgggaattgttcgcgggttgtagttaatatcgagggtgtagtgcggggggaggcgggggtcgcggttgggggaggggaggcgggaacggcgtagaatgagagagaatattcgtatttggtttaatgcggatttttgttttcgaggtcgggggggatggggtagagagcgtttttttatttttgtacggaaattgaagatagttttgaggtttagagataggagaaacggtatcgagtataggatttcgaggatttaagtttcggttttcgaaggaatgcgtttttatttttatttttaattttagttttaatttagtgtaaagcgtggaagtagatttttattttttaatttttagttttcgggttcgagtaatattagtattgtttttgcgtttggaagtagaaagtggaggatttaaaataagagaatacgataatttattttacgatattgggtattttatttatttatttttttaaagaagatagcgtatttatttatttatttttttcggttatgtgtgggaatattaaggaaattgttaaatttttgagatattagtagataaatattgtgtaaaatttacgtgcgaagatatttgaagggggtgtttgttcggttttgagttgggttttaggggtagggagtgcgaggtgtggttatgtgggtagggtggttagttcgggatgataaggcggggtgtgttttttgcggggaatttaaatttgcgttgagggttggttcggtttcgttaggaagttgtgtttacgggagttcgtagcgggtgattttttagcgcggatttggagggtggaggacgggggttggaaggatagtgtttagttgcgtttgggcggaatatttcgattgttgggattttaggagcggttttacgttttggaatacggggttttggggaggtaaggtgttttagagtgtgttacgttttttaattttttgttttgttgcgtaggatagtcggggttacgttgtcggggtttagttttagcgcgttggttatttttagggcgcgaagacgtatgttttcgtatagtttcggtttttttttttttatttttcgggttcgggggtcggggttcgcggtgggtatttggagaggggcgaggtaggatgaggtcggcgggcggatagttcggggcgcgcggggagtcggatcgtagatttgtttttagtcgtcgcgttcgggagttaggagattttgttatagatagtaatagggaagcggttgtttatagtaatatagcgtcgttagggtcgtttttaggtaacgtcgcgcggtcgggcgcgtcgtcggtttggcgaggttatttttttttttagtttttttgggtcgcggttttttcggttcggtcgcggtcgttttcgtcgtttgatattattcgtcgggttcgggggttgagcggttcgcgcgaggttgtgcgttaatttttatttttagagatttaattcggtaggagcggggagggtaggaggcggggattcgtggaattgggttatttgttatttttgtattttttgttataggtagaggtgaaaatagaattttattattgtatgttattggtttatgttggtgggaatttaggcgttttttttttttatttataaaaagggagggaaacggaaaaatatatataatacgtaaatatagattttttggagttgttttgaattttaaagtaattttgcggttttcggtatttttaattttatttttgattatagaaagaaagagggggacgggagggaaaggggttatgaagttaaatatattttttttattattaatattagttttagataaaataggttaagttttgaatttttgagtttggttatgattgttatttataattagattttaggttatttaataggaaatttgattgggtgcggtggtttatttttgtaatttttgtattttgggagttcgaggcgggtggattatttgaggttaggagttcgagattagtttggttattatggtgaaattttgtttttgttaaaaatataaaatagtcgggtgtggtggcgtacgtttgtagttttagttatttaggaggttgaggtaggagaattgtttgaattcgggaggtagaggtttttgtgagtcgagatcgtgttatcgtattttagtttgggtaatagagtaagattttgtttttaaaagaaaagaaaagaaaatttagaatgatttgatttattttttttttaggtttaaagtatttcggttaatatttaaaagatgtgttaagattttatatttaggatttattttaaatatatttattttgtttttgttaattaaaaaaaaaaaaaagaagaagggtttttgagtgagtttattttttttagatagtttaattttttttttttggtattattatgattagagttggagatttattaaatttattttttggaaaggataaattaagtttattttttggaaaggataaattattatttaataaataattttgtttaattatttatttaataaaattattgattgggttggaggttggtgtttattgtaatgaagagggtaggtttgtttcgatttttagagagattttagttttataggaagattaataagttaatcgagtttatagggtagtagtaagtggtttgaaagaggtaagaaaggggtgttaggtaatatagaagaaggtttggaaataggttttagaggaggtgattgtaatatagagatggggtttagattttttgttttttggataatggaatgataaagattgagtaaggttagagtattatttaggtaaattaagtgtttaattagaagttatagtataggttaatataattttagatttttttttttgttttattaatattcgaatttgtgattattttaatatatttttatattttaatttgtttatggtatttattttaggattgtaaaattatattttaaaaagtggagtttatataaggtagtttaaaaatgaagataaattagaataaatatgtgaaattatttttgttatttgtagatttgtaggttagggtgattttgagataggtgtttgtgtgttttcgtgagtacggcgttgttttttaatagggtagggattttatgttttggataagtttgagtatataaaattaaaatgtgtgtagtttatgattatttatgtgttgagttttttttatttggggatttaaaagtgaaaaggagggtagaattttatatttgaattttaatttaaattgaaaaaaaatttattttttttttatagtgtttttttattcgatagattttttttattttgtattttttttgtggtatttgaaggagatttgattttatatttttgaagttagtgtatattgtttagtttggtgttattgtaatattaagtgaaaggttgttgtttgtatcgtttacgtaaatgttgtcgtatatagtttatttttagtatgtagaagtagttgtttatttggggaagtttggtttagtggtgaagggttgtggttaaagtacgggattagaagttaggaagatgtatatatcgaaattaatttagatttgtttggtaatttttcgtttttgttttgtttatgtgttgatatttatttaggatttagtatagtgtttgaaatatagtaggtgtttaataaatatttttttttttttttttttttttttttttttttgagatagggttttattttgttatttaggttggagtgtagtggtgtgattatagtttattgtagttttgaatttttaggtttaatgtttttattttagttttttaagtagttaggattataggtatatattattatgtttagttaattttttattttttgtagagatggggtttcgttatgttgtttaggttagttttaagtttttggttttaagtgatttttttatttttgttttttaaagtgtcgagattataggcgtgagttattaggtttggtaataaatattttttgaatggatgaatgaatgtatgtttttatttagttaaggtgaatgtagacggttgtgttttttgggtatttagaaagtaaatagataatgttttttaaatttttggaaaggttgaataggtttttttattttgggatatgaataggtaaaaattgggaaagataaaattataagatgtttgggttatttttagttggtatagtttttgtgtataaagaatattttagtggtttatgatgaaagattaaatttatttttgtttttgagttttatgagaaagatagttagtgtttatatataaatattatattgtttgtaatgataatgattatgttattattattttttaatttatttattttaaatgtttggatttaataagagaaagaggtattttataatttttgtgggatttatatatacgtgagtttagtgaagggttttaggaggtcgaggttatttattcgatggtttagatcgtgagtaaaaagattgtttttatttagaatattggaggtataagattattatgttattttttttttatatatatatatatgttattattgtaattaattagtattagagatttagtttttttgagaaaaattgttttttttttttgaataatttttggttttttgataggagaggatg

SEQ ID NO: 519 - DNA, 56153 bp, Artificial Sequence
  chemically treated genomic DNA (Homo sapiens)
tttttagtttttattattacgtgagttaattttttagtttttattattatgtgagttaattttttagagtaaatttttatatatgtatatttgttggaatttaaattttggattttttagaataataagaaagaaatgtttggtgtttaaatcgtttagtttaggtgttttgttatggtagtttgagtagataaagatatagaggtaaagtttttgaagtagggaagagtttggtgtttggtttttaggaggtgatagtgaagaggtgggtagggttatattatgataaagcgtttggggaattttttttgtaggggtttgttgaatagttttcgagtgtagggaagtgatatgatttgatttttatttttttttttttttgagatggagttttgttttgtcgtttaggttagagtgtaatggtatgattttggtttattgtaatttttgtttttagggtttaagcgattttttttgttttagtttttcgagtagttgggattataggtgtttgttattacgttcggttaatttttgtatttttagtagagatggggtttcgttatgttggttaggttggttttgaatttttgattttaggtgatttttttttttggtttttttaagtgttgggattattgatttttattttgaagaattggttttggttttggcgtggaagtaaaggatgttatttaggaagtgagagaaagggttataggcgggtataggatttgttgatgggttggatatgagaatcgagaagtagaggaagtaaaggatgattgttaaattttggggtgaatttgggtgaagttttaggaaagaagtatagaggggtgtgtgtgggtgtgtgtgtgtgtgtgtgtgtgtgtgtgtgtgtgtattttaagttaaatgtgagtgagattttattagatagttcggtagagttgaagagggttgatataggattttggttttagggaagagatttaatttggagattatgtttttggatttattatttattagggtaattgtgttggtggatttttggggtatttttgagtgattttttttagtttatgatgatgatagtcgtattgatggaaggtgtgaaagttaaaatttattttgtatttataatgtgttaggtattgatttgagtgttttgtgtgtataatttgattgattttatataattttttaatattttatttttgtagtttaaggaaattgaagtattaaaaggtaagtgttacgatttatttttagagaagtattttattgtggggatgttggtagtagtttattttgtaatagtatattgggttgtttttgtatacgagtttttatgtttgaggaatttttttttttttagttattgtattgtgtacgtttaatagttgggtgttgtgaaagaataatgttggatacgaattttggggatacgggtttaagtttagtttgttatttatgggatattttgttttgggaatatgaatatatagagtttataggatgttttttaggtaaagttgatttatgtttgtcgtttttgttttgttattcgttttttttttagttattagacggtttttgttagtttaattttttttagttaatttttattttttggttgtgttagtttgattatttttaattgtttttgattgtttttagttgggtttagaagttggcgttttgtgggagtatagaggtagttttttagttatatggggcgaggagatggggaaggaaaagggaaggaaggaagtagttggtacgagttaattgagaaagttttttaaggttttatagtttattgggattgtttttgtttttgaaagggttaatttatttaagttagagaatgatttattttcgataagataaataattatatttgttgatttttaaaggtaattaataatgtatttaaaaatgtttttagaaagttattggtaatttgttttttttaggatttgatggggttttgtttttaggagtagtaaaattttatttgagaattagtgaatgattatttttatttatttatttaatagatatttattgaataatgattatgttttagatatcgtgttaggtattgtagggtaaataatgaaattagatatagtttttgtttttaataagtttaaaagagaagaaagttatagataataagtattataggatataagaggaatgtgaaatgattatatgaattaagagataatagagggagatgggttttttgtagtttattggttggggaggtttttatgggaaagggaatatttgtgttaggtggaaatgagtcggagatagtagattgggggcgggtaaggtataggtaaaggtgtggtagtagggaggtcggatttcggttagtattattttttattcgggaatttcgtaggaggataaggttagaaattagtttgggttaattagtagagaatttttaaggttgtattattgttgtattgaataattagatgttttttgtatattgaatatgagggtaatatattgtgtattaatttgttttatataaagatatttttggggtgattttttgttaaataggttattttagagattaggatttgtagttttaaaattagttataaaggggacgtacggataggatttggatttttttttggtatttattttagtttatggaattagtagtgaatttgaattaaatttaggtagtaggtttgaaaaagatttaatgggtttggatttttttttttttttattttttttttgatttttattttgagaggataattaaaaggaaagaaaatttttattttattgtaaatgttatttattatttttatgaaattttttttttttagattataaaaatattttggggaatagttttagaaattttttttaaattttaataaataaatttttaaatttttataaagagtgtatgttttaatattaaaaaaaattatattttattaatataatattgggtggatttttaaattgtttttgatggaagatttagagtggtttttttttttttttttttgagaaggagttttgttttgtcgtttaggttggagtgtagtggtaagattttagtttattgtaattttcgttttttggatttaagtaattttttgttttagtttttcgagtagttgggattataggcgttcgttattacgttcggttaatttttgtatttttagtagagatagggttttattattttgattaggttggttttgaatttttgatttcgtgatttatttgtttcggttttttaaagtgttaggattataggcgtgagttatcgcgttcggttttagagtggtttttattttaaagtgagttttatattttttattttttagatagttgttggatatttattttgttggtattacgttagttattattttttttttatgtaattgttttgttaagatttgattattgaattagagatattaaaaggattgaatgaacgttattgaaatagttaaggtcggtgggagtaaagaagtttttttagtatagtaagaaaaatattttaagttgtatttttaatattggtaaacgggaataatgagatagaataatagaaaacgtagtatgtttcgttataataattgaggttggtgatttgtaataggtaggtggatgaatatagtagcgtatttaaaattagatgtattgaaagtaggtatttttttgcgtttttttttagatgggttagcgagatttttagatattggattgatgatagttgttgtttttttattttttatttttaattttaaagtattgttatgggtcgatgttatatttgtttatttaggaataaataatgaaaggaattttgttaggattaaatttttttttttagttttgatgttgtatgatcggggtgaagtttttattaaatgcgggtattttaataggtagtattttgtaaatgtttttttttatttattttttttttttttttttataagattttttattttcggtttgagaagacgttggggattttgggagagggtttagtgtcgttagggtagttgtaattgtttatgcgatgagtatagttatagcgtttgtagaataaaagtatcgaagagaggcgagcgtcggtttattttttgtaattataggtattattttaatggaaggtaaagaaggtgtaagttataagtagaggtagtaaacgttttggtttttatattgttgttgttattattattgttgtggttgcgttttttttaatatagttaattaggttgcgtgcgagttcgggtagacgtttggtcgtttttttatttttttttttagttatttatttatttttttattttcggtttagggggttttattgtgtggcggatttagggtcgggtacgtaattcgatttatagtttacggagttcgagagttttttttttttttttcgtttcgggtgggtgcggttagtgggggattttatcgtcgaaaggtttagaaaatttaagtttagaattcgggtaagaggcgtagtcggaggcggttcgatttgggcggttcgggagcgcgcgttttcgaggtcgcgtaggttttttttgtttggcgtttaggtggttttttcgtttatttcgtcgttttttttttcgggtttttttttttttagcgagggtcgagtttgattgtggcgcgcggggaaggaggggttattagggatttgaaagtgtacgggttgcggagtggagttcgtatttgttttcgtcgttcgcgagcggattaaatttttgtaaatttaaattgaatggggtttttttttgttgttttttagagggcgtcggtagttcgtcgcgcgttttttttcggcgggagcggtcgtttagcgtacggttaggagcgatcgcgggagttcgatttaagttcgtgcgggttagacggcggcggcgaggcggaggttgcggaggtattcgggttttcggatttaggtattcggatttcgggatttaggcgtcgtcggatcgcgttttatttcgcgcgttcgagtagggcgattgttattagttttttggacgggattcggggcgggattttggtgttttgaaaggggttcgggcgattttaagaggaagaatttttgggggcggggttttcggtttcgcgttttttgggtagtcgttattgtttacgcgtttcgttgggcggcgcggggggcgtgatcgcggcggtttcgggttttgggtgcggagatttaggcggggttgggtttagggcggcggcgggagaagtcggggaagtcgaagagtttggggaggaggagttgcgagcgcgggagacgagtaggagtcgcgcgggtcgcggcgagcgcgatgtcggcggcggcgggggacgggtttttgggggagtcggcggcgtttgggggcggcggcggcgcggaggacgcggttaggttcgcggcggtttgcgagggaagttttttgtttgtttgggtgagcggcgtgtttcgcgagcggtttcgcgatttttagtattataagcgcgtgggtaattattttatcggtagtaggaagttgggcgagggtttttttgttaaggtgcgcgaggggttgtacgtgttgatcggggagaaggtgagtttttcgggcgtcgtggggttggggtataggggcgggagtcggcggttaggatttcgcggggagtattgtattgggagttttagtgtgtagtttcgggttaagcgtttttttttttcgttcggtttttttgttgggttaaaacgcgcgtttagtatttcgtagtttttttcgaaggcggtttgcggttcgttgttcgggggttgggggtttgggaggggacggttttgtttcgggaagcgtttcgcgcggtcgttttgttcgtggaagggcgtcgtttggcgatattagcgcggggggcgggatggggtttttttgttttttaggtcggtaggggcggcggattcgtggcgaggcgggaattagggttagaggaggtgggtttttatgtcggggggcggggggggtaggaaagttaatagttagtttttggggggagtttagagtttgattttcgttttgggttttcggaggaggtgggagaaggttgagattttgtatttttttttatttgtgggtttcggtagttagggaatgttttttggtagttagggaatttttcgtgtttagaggagggtttttgttttcgttttttatttgtttattttttaatttgtgtttttttttatttatttaatttttttatttttgtttttttattatttattatttttattttcgttatttttattttttttttttcgtttttttagtttttttgtgttttttagttttagggtgggagttgtagtgaagattttgttattggtaggaatagaattatagatatttttttttagagattgggagatgtttttttatttttttagaagaggggaaaggaaaggggattttcgcgagattaaaaggggtatttttttagttttgttggaagttagatggttgtgaatttttgttaggcgaggggtaggtaagatggaaggtgtaatttagagttgtgagaagaaatttaagagtttggtgattcgtttttgaggtcgggttattttaggttggagttgttcgagtttagagttaatttaggttggagttgttttaagtttttgttatttcgggtttaagattgtttttaggttgggggtggtttaaatttggagggggattagtttttttgtgtggttcgtgggttagggaggcgttagtcgtaaggagggaaggcggagtttattttttaatcgagtaggtggtttgggagtcgagttttttgtttttcgatttgggggtttttgtttagtttggggttgttttgtgaaatttttggttatagggttaatttgttttttttgtttgtttttagttttattttatttgtagttttttttttattttattttttttttttgttttggagttttttgtttgtgaatgtaggttttcgttatttttgttattttttttgtgttttttatagtcgttttgagtgaggtatcgttttattatgggtatgtggggatagagtgagtagtttttagaagtgttttttgtttgaatttttatgtaaaaaaggagcgtttagtatgaatttgagtaagtttttaaagaaaaaggaaaaatttttaaatttcgttttagttcgtaggagcgaggtatatttatatttttcgattcgattcgattcgattcgtagtgagttgtttgatttttatattgcgggttcgtttagggcgcgaggatgcggttaattagagtgagttttttttttttggttttgtgtaaatttttgttggtattggcgatggaagtttatttttattggaaacgtataggatttaggttggttgtgtatattttttttttaaatataacggaaagaagcgagtttttatgtttataacgttatggtaaatattgtaagtatatttttttcgtttgttttggtgtatagattttttttttggtttttttttattttgttgtgttgtgttgtgtttttggttttgtagtagcgtatttttgtattataaaatttttggttttggttgaattgtttgggggtggatttagagtttagttagcgtttgggttttggagttttgtgttgggtttattgggaatttcgatatgtagggaatttttgtttaaataggatttatatgaagagattcgttgtttttttaggtgtttatttttttttttttttattttatgttttttaaatgatgaattttattttattgttgtaatgataggagatgttaattggatgtaaaattatttttttggatttattggtggattgcgggtaaggatggtggttttttgggtggagaaggaggtaggggagagatgtttgtgttgaaaaatttggttttttcgggatgtttttttttagcggggagaattagtgttttagggattgcgggtattgggagaaatttggattttagtttatttaattgttggttttaaagaaataatggtgttatttataatatttattttttaaatttagtatttttaatgtttaattaatagatttgggttttagtagattgtggggattaaaatggttgtgtgtgtatgtttgattttgagaaagattgttaaattaaaatgagtttttatttttattttagttttgggtattgtttaattaaggttaaaataaagatgattatagttttaggttatttataatttgaagtttttttaaaaggtgagttattaagatgattttggtttggggaaagttttttttagtgagtagagttgaggaaaaggaggttattaagtttttagtgttttttattgtgggtgatttagggaggttttttttttttattaatttttttttttttggggtgtgtatattttggatttagaattttattttttttttgttttatttatttattttttaaattttttataaagataggggttttattgtgttgtttaggttggtttttaatttttggttttaagtgatttttttattttggttttttaaagtgttataattatagatgtgagttattgtatttggtttatttttttataaaggatttattttatattaggaggggaatgaagttattaatattgtagtgagaagtatttttagtttacgtggagcgaaaggatttagggtagtttgttttgggaaattagtttatgaaaaagttgaaagagggtatagggaaatagaagttgagagggtattttaagtttggtttgttttatagttgtatttttaaattgtgagaattagttttgggtgatttgtgttaaaatttagggtattgttagttgaaggtatttggtatgggggtgtgtgtgtgtgtgtagcgtgttgtgtttcgatttggttatatttttaaaaagttttgggtgaaattttttatggtttgttgggaattattgtttgagtttagatgataaagggagttagttttttttaattttttttttaggttttaatttgattttattaagaggttgtttttgttattattgtttgtaggataattttttgtttgttttttttttgaagttgtttgtttagaagttatttgaatttagatggtttttttattgtttgtaaaggaaagatggtttgcggttgagatttaattgtgtttttttttgagttaatgtaatttttgttaatttggttttaaaaataaatagtttatttggttatgtgaaatttttaataggtatttttatagttagggttgagtgtttttgattaaagttgatgattagattagggaaaatgattataaaattagattttgaaaagtattattttttggttttgagacgaagagtaaagttgttgagtaatagtatggggtaatgattttgaaatatttggagtggttgtgtttgtagagtttggtattgatttgtgatatttatgagaggcgtggtttttggtatataataagtgtttttcgttttggtttttaattagatagagtgatttgggggttgttgtatgattagataatattatttgtcgatagaataaggaaagtgatttatagaaaattgaagtgaggtttagaaataggatagacgtggtggtttatgtttgtaattttagtattttgggaggttaaggtgggtggattatttgaggttaggagttttagattagtttggttaatatggtgaaattttgtttttaataaaaatgtaaaaattagttaggtgtggtggtgtatatttgtaattttagttattttggaggttgtagtaggagaatcgtttgaatgtgggaggtggaggttgtagtgagtttagattgtgttattgtattttagtttgggtgatagaatgagattttattttaaaaaaaaaaaaaaaaaaaagagtttaagattttaaatttttataaacgttaaattttaaatgaagtaatttagaaattacgtataatgtttttaatatagatattataaataatgtttgtaaggaattagtaaaataatggttttttattattagtaatatatttggataattttttagaagtttggtttagtggttggacgcggtggtttatgtttgtaattttagtattttgggaggtcgaagtgggtggattatttgaggttaggagtttgagattagtttggttaatatggagaaattttatttttattaaaaatataaaaattagttgggtgtggtggtgtatatttgtagttttagttatttgggtggttgatatatgagaattgtttgaattttggtgatggttcgtgatatttataagaggtatggtttttggtatatgataggttattgtgttttgtaaaaaattgataaaagttgaaaaaatatagttggaaaagttgaatcgagaaaagagtaggtgtattttaggtattgagttagtgttgtaggtaggtaaattatagaataagaatagatagtttatgttattgttattttttttgtgattgagttttattgagatataaagttgagtatataaaatgattggttaagatgttgaaatattttgttttaatttttggttaaagaataataagtcggtttgttatttttattagaattatttttaggttaagagtaagggttgtttgtttattaagttgttagtaattatgtttagagtatgatagtgttagatatttggagtgaaggagttattaaaaatacgatttattatgttttgtagagtaagaaatatgattaattttagaggtggttttttggtagatttgtttttagtaagtatttttgaaataaataggtgttaaattttgtatttttgaagtgttagaagtttaggggtaatcgttttgaggaataagaaatgtttagagaattggaaatttttattaatttttggtagggattttttggtaagaaggaggtatttgtaaagtatttgtttggtgagttttgtgtgataaggtagtgtttgtaatttcgaggattgtattttgtagttgtaggcggatttttttgaattttttgttttgttttatttttttgaagtatttgtgaatgatggaaattggtacgtagggtttggtttttagtgtttattgatataggttttacggattttaaagggtgttttgagttagcgtaatagtgtagaaacggtgtttacggagaggagtataattttatattttttttgtaggtgttgagttacggttatagttattcgtgtatattaattcgatttaggtttgtgagattatagaattttgtatgttgttagttattggaggttagcgcggtaattatttgttttagggtttatttgtttagaaggggtggggagtggtagttatgtgttttcgaagagagggataggttggggtgttttttatgggaaggaggtttgggtatagggttattatttgttttgggatatatattttttttgtcgattatttatggtaacggagagatttgtttttttggttaattgaaattcgtagataatttttaggttttatgttagttgatgggtgaaatttttttttttatttagttttggtttaagtattgatttgaattgaattttacgttttttgataggaggtgttattgggtggtacgatgattagtaggaaagagttagaaatatagggattgaatagttttcgaggagggggatgtttttgtgaattcgagatagttgtttttttttttttattattagtattagtttagtgttatagtgttttacggttttttttagggtgtttttttcgtgtatatttttgttagatgtttgtagtagttttggtggagggggtaatagttagtttgttggtgtttttgtttgttttgattacgtagaagggtgttttgagtagattttttttttgatattttttatgagtttgttaggatggttttaataaattattatatattgtgtggttttaataatagaaatttattttgttatagttttggaggttaggatttaaaattaaggtgttggtagggttatgttttttttgtagttatagggagaatttttttttgttttttattagttttcggtggtggttagtattttttggtattttttggtttatgattgtagcgttttgtttttgcgtttgtttttatatagtgtttttttttttgagtgttttttttgttttttaatttttttttatgtttttttataaggatattagttatgggatgtaggtttattttaatttagtgttgttttattttaattcgatgatatttataaagtttttatttttaaagaagattatatttataggtattaacgggatttgaaggtattttttgggggagtatagtttaagttttagtatttttttagattgttagtattgggttgtggtaagcggattttgggaaggagatgaatgtgtttttagggattatttttagaattgatttttgtaagggaaggggtaaagtagtattgggtagagggagaagttgggttttaatatcgtttttagttaaagtttttgtttatgtcgtggtgagtgttggagttgagttggttttttagagttgattaatttgggttgagaggattgggatttatattttcgtatcggttagtttttgatgggggttgtttaggtaaggggtatggtttcgtacgggatagttgttgagggcggtttttggggagagtttatagttgatagtttgtagttgaggtagttagttttttagtattgacggggaatttgggggtgtagtttagtatttgttgtttattgaaagagatagggttagagtttagggttttttatttgagtttatattatatggatcgtagataacgtgggtattttttttatgcgtattttggatatgagtggttattatttttatgtgttggtattaagtttttttatttcgttattttgaaatatataaagtatggttaggcgtggtggtttacgcgtgtaattttagtattttgggaggtcgagggaggtagattatttgaggttaggagtttgagattagtttggttaatatggtgaaattttgtttttattaaaaatataaaaaaattagttaagtgtgtgtttttgtaattttagttattcgggaggttgaggtaggagagtcgtttgaattaaggaggtggaggttgtagtgagtcgagattgtgttattgtattttagtttgggtaataagagtaaaaattttataataatagtagtagtaataataataataataataataaagaaatatataaattattgttgttaaatatagttttcgtagtaaatattagtatttagtttttttatttatgtatgtttgtatttatgaattagtttttttttagtttgttttattttgttgttcgattgtggtttttttttttgtaatgagggagtagtcggcgtggtattttattagtagattttatgtgttatacgttgggggattttttggttttatattttttttaggttagaattattagggttttgttgtgttttttagtatttataagattgaaagtttattttatatgtatgttttatgggtttttttttgagaattttggggtaattgagtgttgggttaagttgtgggttagtatgtttattttagagacggtggtatttttttgggaagagatttttttttttttattattcgtgagtggtgggaaaagttgttgaaggagttgtgggaatttggatttttgatgagtagagtaatagtttgggatatttttatggataaaaaaaattatttagggtagagttatttgttaatatttttttagtatttttacggtggttattgtgttttagttatgtaatttttaattattgggttttttttggtttttaattatttttgtgtttttaagatgtatttggttaagttttggaattggtaatatagatatatggtttgaaatttaaaggttttgagagggtttgtagtgagaggtaattgttttttatttgggttttttagtttttggattttttcgtgagaggttatttttttttttagtttttgtgtatttttttagagatattttatatgtatagagatttatatatatatttgtaaatgcgtagttaggggtagattttttttttttattgatatataatattttatatatttatggggtatatgtgagtgttttatgtatggagtgtgtaatgattaagttagagtatcggcgtgtttattatttaagtatttatttttacgggttggtattatattaagttttttgttttagttattttgaaatatataaagtattgttattaagtatagttattttaatagatattagaatttagtttttttatttatgtatgtttgtatttatgaattagtttttttttatttattttttttatttattagggtagatgtatttttaaattgtatatgttgtttattattttgtttttttatttagtaatatgttttgagtatttttttttatgattattatagaattgttttattttttatgttaattagttattgtatagtagttattgtgtggaagtattatgttgatttaattattttttgttgatggatatttagggagtatataatttttttttttttgttatttttaaattatattttagtaaatatttatgattatttgttattttgtaaatgtgattttttagtgtatttgaggggtaaatttttagttttaggttaaaaggtatgtttattttaattgttgataagtattgttaaattgtttgttatagaggttggtaatttataattatattgataatttttataatttataagggtttttaatttataattatatttatttggtatgggagtgtttgtttttttatatgttagttaatagggtatttattttgatttttgttaatcgagtgtattaaatatggtattttgttttatttattgttttttttatttatatgggaattgagtatatttttatatttttttaattgtttgtattttatttttgtttattgtttatgtttattcgttaatttttttttggggttttggttttttttttattgatttataggagttttttatatattaaggaaattagtcgtttttgagtgatatattttgtagtgtttattattttttttcgttttttattattttttttttttttttttgtggtttttgttatttgtagaagttattttttgggagtttatgaattagagaaggataattgataagttttggaggtttatggagttttattaattgtgtgtatgtaaatatatttttgaggagagggtttatgggtttcgttatattttaaatggagttatttatttttaaaatattaagagttattgttttgttgtttatttttgttggttttgttgattaaatggaagtttgtagattattgggttgagggtttgggttattttggtttgttaatatcggtgttagttgggttatagttgtagattatatatatttaggttaggtaggttggttttgtaattatgattttggagtaagtatttttgattttgtttcgatttttattatgtttggattgtaagggagaggtatgatattgtgtgggatggtttttggaaatttttgatttttgttggtttaagtaagataattgtgagtttatgttttattatttttttatgggaaaggtggtattatttatggtggatggttgttatgattagaatgtttgtgttttttaaaatttttttgttgaaatttaaatttttagtgtgatggtatttggagatggggtttttgggaggtgatgagatttatttttatgaatgggattagtgtttttataaaaggtgtttgattgaggttgtagtgaaaaaataaaaaaataaaaaaggttaggtatggtggtttatatttgtaattttagattttgggagggcgaggtgggtggattatttgaggttaggagtttgatattagtttgattaatatggtgaaattttatttttattgaaaatataaaaattagttaggcgtggtggtgggtatttgtaattttagttatttgggaggttgaggtaggagaattatttgaatttgggaggtggaggttgtagtgagttaagattatgatattgtattttagtttgggtgataagagtaaaattttgttttaaaaaaaaaataaataaataaagggtgtttaaaggagtttgtttgtttttttattatatgaggatttagtgaaaaggtgttatttttatgagttagaaaatacgtttttattagatattggatttgtaggtgtgttaggtttagattttatagtttttagaattgtgagaaagatacgttttttttttttttttttttttttttgatggagtgttattttttgtcggttaggttggggtgtagtggtatttttttggtttattgtaatttttgttttttgggttaagtgatttttttgttttagtttttcgagtagttgggattataggtgcgtgttattatattcggttaatttttgtatttttagtagaaatggggttttgttttgttggttaggttggtttcgaatttttgatttgaggtgatttattcgttttagttttttaaagtgttgggattataggtacgagttatcgcgtttggttaaattgtttgttttttataaggtatttagtttatggtattatggtattatgttatattagtttaagttgattaagatagtggttgagaagaaagagaaagggggaatatcgagggaaatgaaaattttttaaggagtaagagttattacgtaatttggatataaaatgtattaagataggtattagtatattaatgcgtgtgtgtgatagtgtatgcgttttggtatttttcgaggggttttgtttatttgagatgttttttgaggagtagttttggtggggtcgataggcgggttttgttgttggaatttttgtggtttcggtttgacgatcgtttttgaatgttttgttttttgttattttttgtttttttattttgttttgtttttttttattatttggagtggtttgttagagttgttataagatagtattatagattcgggggttggaatagtaaggttttattgttttttattttggaggttggaagtttaaaattaaggtgttggtagggtgggtttttttgaggtttgtgtaggatggatttgttttatgtttttgttttcggtttatttatggttgttttttttttgtgtttttttatatcgtttgttttttacgtgtgtttgtttttttgtttaaatgtttttttttgtatttttttatttttttgatatagagatttgttttgttgtttaggttgttgtgtagtggtataattttggtttattgtaatttttgttttttaggtttaagcgatttttttgttttagttttttgagtagttgggatgataggtacgcgttattatatttatttaatttttgtatttttagtaaagattattttattacgttgattaagttggttttgaatttttgatttcgtgatttattcgttttagttttttaaaatgttgggattatagattatagacgtgagttattacgtttggtttatgtttttttttgataaggatattagtttaaattggattagggtttattttaatgattttattttaatttgattatttttttaaagattttatatttagggggttaggcgtagtggtttacgtttataattttagttttttgggaagttgaggtaggtagattatttgaggttaggagtttgagattagtttggttaatatagtgaaattttgtttttatgaaaaatataaaaattatttgggtgtggtggtgtatatttgtaaatttagttattcgggaagttgaggtatgagaattatatgaatttggttgggaggcggacgttgtagcgagtcgagattgcgttattgtattttaaattgggagatagaatgagattgttttaaaaaaaaaaaaaaagattttttatatttaaataaagtattgaggtattggggttaggattttaatagatgaattttggggggatataattaaatttttaatattatttgattttatggaatatatttagagttgatgtgtttgtttttttattagagtgtaagttttatgaggaagagattattgttttatttttcgtgttaagaatagtttttggtatagagaatatgtttagaaaatattttttttttttttgagatagtttcgtttttgttgtttaggttggattttggtttattgtaattttcgtttttcgggtttaagcgatttttttgttttagtttttcgagtagttgagattataggtgtatattattacgtttagttaatttttgtatttttagtagaaacggagttaggttggttaggttggtttcgaatttttgattttaggtgatttatttgttttggttttttaaagtgttgggtggtatgagttatcgtgttcggttagaaaatattttatgaatggatttaagtatggtttgatttttttaagatatgtggatagttttttagggggtaatgtttaagttggtaggttttggttttgtaagcgttgtatgttttttttattttttgttgttttgggtgtgtttgtttgggtgatgattatgttgaatgggttgtttggttggtgttttgtagaaaaattttggtttttgaatagttgtgttttttgcggggatttagttaggtatttaggtatttgagtgataggtgattaattagaattagatagtattttgtagtgttaggggatgttaacggatttttttttttttttgagaaaatgtagtaatattgtaatagatgggagaagttgttatttgtaaatatatattttattttggatgttttttatggagatatatgtaggtttggagtttgtttttttgattgtaatttttttataagtttattagttttttaagttatatttttgttaaaatattttgtaattttgtttgttttttttgtttattttttgagttatttgatttattttgggttttttttttgtattattattgttattttagttttttttttgagtttttgttgttttatgtttaattttaaggttttttggtaagtcgttaggttatttttttgtttttttttagacgtttttgtatgtgacgtttttttttttgttatcgtcggttttttgtcggggttttgtgtgtagtagtttgaaagcgtgtagtagtagtgggtgattcgtgaatatagagcgtggtgttaagagataaaggaatagtggatgttgtaatcgttttcggggagtttcgttagttttgtttagggatgatagaatgaagtttggatttttagcgatttttttgtttatttggagtagaatacgggtaggtaggttatgattgtataattttttaaattagtaaaaatttgtaggaaagaaatgggtatatggtttttgttttgattatgaggaggttatattgattacgaaaataatgaatatttgtggatttcgtattatttgttgggttatgttttggatgttttgttgtatgagataatttattttttatagtagttttttgtggtaggtattgttgttttgattttgtagattaagatgattagaattttggtttgtttaggatttttttaagtttaatgtaggaagttttggatttgaggaagttttttagataatgttaaaattatatttatttaggaaaatattttattagagtgtttggagtttaaattgtaggttttcgaataatagtattaataagtagttaattaggttatgaatgagtgaagaagtaaagtttaaagttttgggcgttattgggatgtttttgttggtaataataatgtttttgtgtgtttttagggattgagaggtgttttttttatatatgtagtatagatttattatttttatgggtttatatgagatgaggagtttgagttattaataatatgtgtgttaggttggacgtagtgtttacgtttgtatttttagtattttgggaggtcgaggcgggtagattatttgaggtcgggagtttgagattagattgattaatatggtgaaattttgtttttattgaaaatataaaattagttaggcgtgtatggtggcgtatgtttgtaattttagttattcgggaggttgaggtaggagaatcgtttgaatttaggaggcggaggttatggtgagttaagattgtgttattgtattttagtttgggtaataagagtgaaattttattttaaaataaaaataaaaataaataaataaaaaaatgtaaaaaaaaagggggttgtatgtgtatatataaatgtatgtgtgtatatatatataaatgtatatatatagatgtatatgtgtattatatataatattaaatataaattatataatattatgttaaatatatatacgtttttgttagtagatttttttaatgaaggaagtagtggggattggtagttttttgagtagttttggttcgtattagtttaattttagtagtattttttttttgcgttgggggttgaaaaatttattggaggggagagaggtttttgaattatatcgtgaagttggaagtgtatttttacgttatatagtgaatagttttttttagttttttcgttaaattatttttttacgagaatgaatatagattatttattaaaaataaaataaaatatttagtgtttttgttttattatgttgacgatttggaggtagattagtttttttaagttattgtttagttttcggttgggttgagaaaggatatgagaggtaaatggaatgaggaagtgttttaggtgaaaaggaagtttagggaaagttagttgtggagtttgagattagaatattttaatattttatttgagttttattttagtgaaattaaatggataaagataagtgttattatttatataatttggtttttagttggaattattgttgttttgatgtagtttttttagtgtatttttgtttttaggttaaaaatttaattagagaaattagtcgatgatttagtttttagttgaatatttatatttaataatattaataaagaaaatttgttttgaaaatatatttttaggtttttatagtgttatttttatagggtgatattttattttattaaaagttaatatttgtgagaagtagttgtaattttaaggttaatttgatataataaaatttgaatttttttttggagggaaggtgttggatggttattttatttttatttaatttattattttgagatgttttttttaagattaagaatgagttttttattataaaggttattaaagtagttgagaaagtatttgagaatgtgcggggtaatagatagtttttttttagtgtttagatttagaattatgttttttagattttaaagggatatattatttaatagtgtatttatttttaaaaagtttaatataaattagtgttttttttatgattaattataaatattttaaaaataatatatttttaagtatttttgattaagtattaagaattttaaaattttttaaattagttaagttataggtatattttagaatagttgagatttttaatagattaaaagaagttttgggtttatatttgatagttgttatttaaattatggttatttatatatatttttttattgttaattttgttatttgttattatattaattatattgtattatttattttttttgttttagatattttttttttttttgagatagagtttcgttttgttgtttaggttggagtgtaacggtatagtttcggttcgttgtaatttttgtttttcgggtttaagcgatttttttgtattaggtttttaagtagttggtattataggtatttattttcgtgtttagttaatttttgtatttttagtagagacgggattttattatgttggttaggttggtttcgaatttttgattttaggtgatttattttgttttggttttttaaagtgttgggattataggtatgagttatcgcgtttggtcggtaaatatttttttaaagtttgatttttggtgatgtatagtattttattatttggagttgttgtaatttttaaatttagtttttaattgttggatattgaggttgttataaaattttttttggatatatgatattgttgttgttatttttgtatgtttatttttgagttattttttaatataaatatttggaaggtttttgatatattgttatattgtattttagaaaggttgtattaagtgatataatagatatgaaagtgattttttaattgagtattttgataattaggttaattataatttgtgtatttgattgaaaatgtgtttttttttttatgaattgttattagtaatttttttttattttttttttgtttattttattggtttatagaaattttttttagattatagatattagttttttaattttttgtttaaaaaaaaaaaaattttagataaattaaatttgacggtttaattagtaaagaatgatttgagaatcgagtattttttagttttggtttttaattagataaaatggaagtgaggtatagaaataggttggatgtggtggtttatgtttgtaattttagtattttgggaggtcgaggtgggtggattatttgaggttaggagtttgagattagtttggttaatgtggtaaaattttgtttttattaaaaatataaaaattagttgggcgtggtggtttatttttgtaattttagttatttgggtggttgaggtataagaatagtttgaatttaggaggcggaggttgtagtgagtggagattgcgttattgtattttagtttgggcgatagagtgagattgtgttttaaataaataaataaaaagaaaagaaatagttggattgtttatagtttggtatttgttttatttgaatatacgaatatattcgtgattggtttagattttgattggtataagagtaggttatatttaataatattgttaaatgtattattgtatatttgtttatatattttgttaggattttgtttatatatataagtgaggttatagtttattatgtgtagagaaattattaggttgaatttaaaatatgtaagaaagtatttttagttaaattttatttaatattttgttatgttgcgaatattgttttttaggtgattatttgttttttgatttattttatggtgtttttattttaggaagggggtaaaggtatatggaaattttgtgttttgtttaattaatttagtagttttttatttttagtttttttttattgtttttatgtataagtaaattagagggtttgttgttggttttgttttataaatgattagtgggtttagtgttttatagttgtttgtagaaaaatttttgtattgggtagggatatttgattatatattttaattcgttatataatgatttaatttgttggtgttatgtattaaagtataggttgtgggggttgatagtttgggatttttatttgttttttgttatttggtatttgtgtgattttgggtatagtgtttaaaaattttaaattttagtttttgtatttgtaaaatggtgataaagatattttatggtatttaatgagaatttggttaaaaaaaaaaaaaaatatatatatatatatatagagagagagagagagagagagagagagagtgtgtgtgtgtgtgtgtgtgtatagtacgtagtttgaaaatatagttattattgtgttagttaagaaaaaagtggttagacgtggtggtttatatttgtaattttagtattttgggaggtcgaggtgggtagattatttgagattaggagtttaagattagtttggttaatatggtgagatttttgtttttataagaaaatattaaaaaattagttaagtttggtggcgtatgtttgtagttttagttatttgggaggttgaggtaggagaattatttgaatttaggaggcggaggttgtagtgagtcgagattgcgttattgttttttaatttgggtaaaagagttagattttttttgaaaaaaaaaaaaaaaaaaggaaagaaagaaaaaaaaagaaatggtagttggttgttttttttatttagatttttatagttatattttcgttttaaaagtatgtattatttatggttttttagatagtaagaaatagatatttatttagtttattatagataacggtattttattttaaggataaagggaggtgaggaaaaagatgatggggacgtttttttcgttaatatttttttgaggatcgcgatgtttttttggatgtttgtatttttgggattttattttttttttgtttatttttgtcgtagattttttttttttggtagtttttgtggttttttgggcgtattttgttatttattttgttttttgttttaaggttttttattatttttggtttttttgtttttttttgtgttttattttttgttttttttggatgtaggggagggaaaaatgttttttttttattcgtttatttatttggttgggttataaattaaatcgatataagatagagtagtaggaggaaaattatatttaaggatatcgtatgtatgggagttttatagaatatgagattttaagaagggttaggttatggaagtttttatagtaattcgagttatagaaaagaataggggtttggggttttgggggtggtggtaattcgttttgggaggatgaggggaaggaatgtacggtggtgaataaagtttgttttgttatgtagataaaagttttttaggtaataaaaagttatttggagtaatttttttttcgatatatgaattttttttatagatattatttgtaaaaggatagtttttcggagttgtttttttgtttgtagttttttaggataagtagtttaaattatgttaaagaattttaattggagtgttatgttttggttttttatagttatgtttcggggtggttggtgtgttttgagttttaatatgggtattattgggttgttttgtatttttgggattgatgatatcgtggtagaagtgtgatattggaatttttattggttttatttttttgttatttttttgttattgagcgttttttaatagtagagaattttttttatagtggaataaagaatgttatttatagatgattttatacgagttattagattagtatggtttgagaaagtttgtgggataattaattttttatgtttttgattaggtaggtaatatttgttttaatatttaggaaaatatgttattgtttttaagggttatatttttttttatgtttgtagttgtagggatagtttaatgtattttttttattgattttttgttagaagttttgttatttttaatgtgtatcgaaggtttttttagttttcgggattgggttgagaattttgttttggatttttattgttaaaatttttgggtttttaatttttgtggttttttttttttttttcgaggttgcgttatttttgtatttttttaattgtttttggttgttagttgttttttggtgtgagaatagagtattgattgttttttgttgtttgtgggataggaatgttttttgaattagagttaattttggagtttaaagtattaaatgttaaatttgaaagaaagtatatttaagatttttttgttgtggaagcgaaggttattttagggtttaggggaagggaaaggaagaaagaaaagagaaaggagaaaatagttgatgattttttttttttttagattattttttttatatttatggaatgttttttttattttcgtaaaatttatttttagatttagaattttgtattttaagttatttgttaggtgtattgtgatgttagaatatttattgttggggaaattttttagttgtaattagtttaaaaaataaaataaacgttatttttatttggagatgattatttgttttgttatttaaatatttaatggtggttttttttatgtagagttgttggtaatttgtatgggtttttgtatatattggaaaagttgtgttttgttagattaattagaaaaagatattttttttgggtgaattaattaaaaaaaagtatttttttaagtgggttaattagaaaaggtgttttttttgggtagtttagttggataaaggttttttgtttgaatggatgtagttgtaaggtgtatggtttagtaagtagatagtattgcgggaggaaatatattttttgttttagggtatagagttggtaagttaagtggggtttggatttttttttttaaatggttttttttattgggtgtttttgtttgaggtattaaatgtatcgcgaataggtttaataatttgatttgtatttagtagttagagttaagttgtgaattataaatacggaatttatgttattatagtggaaaaggttatgttttttttaatagtgattgattaagtgttttaggattttagcgaattttaggtaaaaatttgtagaattagttttggtttttttttttggtaaagtttgtttcgttgtttgttttgtaagagaaagagaagtaaggtgaagaatttggatgataaataaatttagtgtgtttatgttatttaaggtttaggagatataagatatgttttggtatatgtaataattagggttttgggggaatgttttttacgagatttgtgaattttgtgttttttgagttattatttaatttgttttaggggtttagggtttttagattttttgtgtgttaagagttgaagtagttgttgaattagggttttagagattttagtttgtaaattcgaagagaaaaattttttttagtgttgattatttattagttcggttttttttttggatggggaaatggtgtgataatttaataacgggtttgtgataattatatgtaagtggagagaatgaaaaattagttttggaatagagattttttttttttgggaatggtacgtggtggttttggttttttttatgtgtaatgggagaggtttatttatttttgtgtgatagaggaaaattttagtattaggagagtaatttttgatttattataaatagttgggtgggttatgttttattggtgtttaggtttaagtagtttttgaaatagagttgtttagtgtggtttttgtatttgaaagggttagtgagttgttgtgtgttttatagtggttgttgagtttttgttattttgattatttttggtagagggttagtgtgaaggagggtattattttgaatttgataagttttgtatttgttaaggtgtttgttatgggttgaattatgatttttaattataaatttatatgttgaagttttaatttttagtattttagaaggtgattgtatttggagataggattataaagaggtaattaaggcgaaatgaggttatttggataggttttaatttaatgtagttggtatgtttagaagaagaggaaatttggatatagatgtgcgtatatatagagagagattgtacgaaggttatagtgagaaggtggttatttatacgttaaggagaagggttttaggaggaagtaattttgttgatattttgattttagattttgggtttttagaattgtgagaaaatatagttttgttgttggagttgtttagtttataattttttgttttggtagttcgggttaattaatatattttttatatatttttatttgttgagtgttttagaagttaaggtcggttttaggaattatgtcgggaaattttatttgatttacgagattattttttaatgggatttttttttttagtaatttttttttttgggaaggaatttggggttttttttttttattttttgttttattaaattttgttttgtaataaattatattttgtgtagatattacgatatttggaaataattttttttttgagtaaggaaattaataatatttattggatttttgatttgtatggtgttgtgtgttgttttattttatgttgggttaagaaaaaaataaataaataaataaaaataagaaaatgttgtttttttagtggttttttggtttttttggtatatttttataaaatatcgttaaaagaagaaggtgtttgaggttgttattagaatttttttatggatatatataaatgtatgaaattattaggatggtttataaagttttttatattgtttgtaggatattgatatatgatttgtgattattttgcgtatgatttgtgtgaatttaaaagattattttttgtagtttttaaaatgtttattttttaggaatatttttaaagtgattaattaaaaaatgttgttgttagtagtatgatgttatgtggattagttgtttatggttattataataaagtattataaattgtgtggtttagggttaggcgcggtggtttatatttgtaattttagtattttgggaggttaaggtaggtggattgtttgagtttaggggtttgagataagtttgggtaatatggggagattttgtgtttataaaaatataaaaattatttagaagtggtggcgaaggtttgtagttttagttatttttgggaggttgaagtgggaggatcgtttgagtttaggaggtggaggttgcggtgagtcgagattatattatttattttagttgggttgatagagtaagattttgttttaaagaaattaaaataaaaaaaattagtaataataataaaaaattgtgtggttttaataatggaaatttattgttttattttggaggttagaagtttaagattaaggtgagttggtttttttcgagggttgtaaggaaaggttttttttaggtttgttttttagtttttgatagttttaggtatttttggtttgaagggtattttttttttgtttttatattattttttttttgtgtatgtttgttttttgtttaaattttttatttaataaagatataattatgttggattagggtttattataatgattttattttaattggattatttgtaaagattttatttttaaataaggttatatttatagatgttgggagttaggattttagtattttttgcggggatagaattgatttatgatattatgttattgttttttttattttattttattagtcgtaaaaaggtttttggattttggaagtaaagagtaagagataggtaaaggttaagaggatagtgaaggaggtggggtggttagggttaaaaggtagattgttttgggtattgatgttttttgggttttgggtggagggtgttgtttggattttttaggtagttttattgtttttgttttattatgttttattttttcgagatgtttattttttttttgttttgggatgtttattattgttaagtgtatttgggtttatggtttattggtagtttttttggagagagaaagagggaggttacgtggagtagggatgtattgtagagatacgatagttatgttgatattttgttaaggaagattttagattttggaaatagatttgaggtgtaagatttttcgttggtttggtttttaggagaaggtcgagaggtgagttatatagggtagtattttttagttttattttttaatttatatattttgtagtgaaattttatttgggtaaaattattttatgttttgtgattattattaggataagttttatattttgtgggtatttatttaatttatttttgagacgtagtttcgtttttgttgtttaggttgaagtgtaatggcgcgatttcggtttattgtaattttcgttttttagttttaagtgatttttttgttttagtttttcgagtagttgggattataggtattcgttattatgtttggttaattttttgtatttttagtagagatagggttttattatgttggttaggttggttttaaatttttggcgttaagtgatttgtttatttcggttttttaaagtgttgggattataagtatgagttattacgttcggtcgtggattttttattagggtaaaaataggtggattgaatgtgttttttttagtttattttttttttcgattttggaggattttttcgttttttggttatttttatggagaggttttgtattgagttttgttgtggagtggggtggaatagggtaggagtggggtttaagtttttggaagtgtaaggagagaggatgattaatgttaggttagttttgtttggaatgagtttgagaagtttgagagaaagggtagtgtttattgatgttagaagattgatatgaaagtaaagtttttaatatttataaagtattcgattaatatgtttaaatagtttgttaggttttttttaagaaatattatttgtgagtttatttttttttatggtttaacgttataaatatttgtaatgtatgttatcgtggaaattgaatgatgataagttgtttttaagtttttattttttttttttgttttcggtaggtttatgagtataaaaggggaaaaatttattttgtatttggtgttatggaggaaatgatttaataagtcgaggttggtaacgattttttgttgtattgattttatttagatttttttttttaacgttttttattagttttttgggttgttataataaagtattataaattgggtagtgttaaataatagaaatttattattttatagttttggaggttagaagtatgaaattaaggcgttggtagagttatgttttttttgaatgttgtaggggaggagaatttttttttttttttagttttggtggttgtttgtagtttttggtttgttttggtttgtagatgttttattttagtttttgtttgtaaattcgcgtgatttttgttgtgtgtgtgtgtttgtgtttttttttgttgtaaagatattagttttatgggattagggatttattttattttattatgattttattttgattaattatatttgtaatgattttatttttaaataaggttatattttgaggtattggtggttaggattttaatgtatttttatgggaaatttaatttaatttataatgtgttttaaattaaattcgttgtttttgttattgattaatttgttttttttttattttttgttatttttgtttagtattattttggtttttttatttttttagttttttttgggttatttagtttttgtaagttatatttttggttgttgtgtgttttttttttttagatagagttttatttttgttatttaggttggagtttagtggtgcgtttttggtttattataatttttgttttttaggtttaagtaatttttttgttttagttttttacgtagttgggattataggtgtttattattatgtttagttaatttttttttaaatggagacggagttttattatgttggttaggttggttttgaatttttgattttaagtgatttattttttttgggtttttaaagtgttgggattataggtatgagttattgtttttagtttttggttgttttttgatttttattttttattgagtttttttgatatagtttagtttaattttcgtttattttttttattttttgtttttcgtagtataatttattttaattgtttagaaatgaattttaatgagtttataaattttttaggtttatttttttagttttttttagttttattgaaatgttacgttagttttttttggagtttgtttttttttgtttagttggaggtagttttttttcgttttttgttttgtttttatgttattttttttattttatgtaatattttgagtataagtaagcgtgtggtagttgttttttaggttgtaggattatttaggttagaattaggttttagttattgaaatatatatatatatatatatatatatatatataaattttattgtgttcgttatgattttttacgaatagtgggtattttgatagattcggtagaatgtaggtttttatgtggaagttttggttataattttgaggttttgttatggtttaaaggtttttttttcgagtttggtttttttaataatagtattttattatagagttttgcgcgtgtagtgatatttgagttaattagtattttggaagtaagtttttatttagagttagttttgggtttatcgtgtttattgtttaattttttgatggattggatacggagtggttgggaagaattttttagggtagttttagtatggattagatgtttgtagtttttgagtattgtattcgttttttggggttgttatgataaagtgtttatagattttagaataacggaaattgttttacggtaatttagaaggagttggaagtttaaaattaagttgtattttttgagggttttggggaagggttttttttaggttttttttttagtttttggtattttcgtggttattggtagtacgattttagtttttttatggtattttttgtgtgtttttgtgtttaaattttttttttttataaggacgttagttatattggattagggtatatataaataatgtcgttttaattaattatatttgtaatgatttgatttttaaataaggttattttttgagttgttgggggttaggattttagtatgaaatttgttgggggatatataataaatatataataggtttttagtttgagtttttttgtagagtttggggtgtgtttgttgggtgatttggttggttattgaggtttgtagagggtagagatatatttttagtggtgagtagaagggtgtgattatttttatttgtattgtttttttttaggttttgggaaagtaattttcggtttgtatatttggtttttaatgtattgttaggagttttttgatgtggaggttttggtttggtggtaggaatgatgagtttgggttgagtaggtagtttgtgttatttttgtttgataggttatagagattggtaggtcgttttagagggagttttgaagttttaaagttaaggatttagggttagttatatttgtatttagttaatgtttaaatttgtagtttatttgttttgttttttatttatattgtttttttttttgtaaattaaattatgatgtttaggtgtagtaaggttatttttgtatgttaggagagtataggttgttttgcgaggatgtttatggtgtagagatatgggaattatgtttttaaagtgataaatttggagagtaagatgtttttgtttttttttggttatattgaattattatttgatttaggtgtttataatgattaaataatttattgggttatttgaggtttagtttaggttttaattaggttatattatttttttagatggtaaggggttatttagttgtcggttgagagttatatttatgtttgattatgttttagttggatagattgtgggtaagttttttttttgtaaaaaggtataggtgtagattatagttatgaagttatataaatttttaattgggattagttttattgaataagtatttgataagtaagattttgtaaaatattgtatatgttttatgtaatttttataagttttacgaggaagaatatgttattattttttttttttatagaggggaaatttttggtttatatagattaagaaagttggttacggtcgggcgcggtggtttatatttgtaattttagtattttgggaggttaaggtaggtggattatttgaggttgggagttcgagagtagtttgattaatatggagaaattttatttttattaaatatataaaattagttaggcgtggtggcgtatgtttggaattttagttatttaggaggttgaggtaggagaattatttgaatttgggagacggaggttgcggtgagttaagatcgtgttattgtattttagtttgggtaataaaagtaaaattttatttttaaaaaaaaaaattttttttttcgtagggtttgtgggagttatatgaagtatgtatagtgtttcgtagggttttgttggttaagtgtttatttaatgaaattagttttagttggaggtttatatggttttatgttgtggtttatatataggtttttttgtttttatattatgaaatttatagagaaatggcgattgtttaaagagtttattaattgtatgtttattgatagttaaattagttaatttaggttattaaatggattttttagttattggaatatttattaagtttaagttaattagatagttgtttatatttatttattgattttttagattatggagattcgttttgtgtgttgtttaattataagtttttatattattaattttttttttatgtaatgataaaatgtgtttaatataatgagattaatattattgatttatttttgaaaatgtgattatgattaaagtgtttaattttattttttttttttcggtgcgggagagaggtggaatttgtaattaataaattttgattcgatgaaagttatattaaattttttttaatatgattttaatataataaagttttattaatgttgatgaaagtaatggataatttatgtttgatttaaatttagagtatggggtttagtgggatagaaaattataaattgagaataataattttaattatagttatttttttattataaattaaaaaagatattttagaatttaaaatgtatttttataatgattagtttttgtaagtggaaaatatttttttgaagtcgatgatattttgttttttagaaataatttttttattgaatttgattatataaatatttatggtgttgcgtgtgtatattttatattgttttattagttattttttagttattggaatagtaaaaaatgttcgttaggtattaaaaatattgtggagttgaaaataatttttatttttggttatatagattaatttatttttgttaaaaaaaaaattatttttatagttaggcggttgattaaatgatgaataagaagtttatattttaaaagaattttgaaagttagtgttttggatagaatagaaatgtttgtgttttagttttggaattgtttgtgtgattttaggtaagtttttaaatttttattaaataaaatttattttttcgttaacggaaataaaagtaaaatttttaattgtttttttagtgattatagttttaaaaggattgtgttatttttgtatgtttataagatgagatttagaagattttggagaaagtaagaggaatgttttaagttagtttttttaaaacgtttttaggttgtatttaatgggattaatagtattggttgaaagttattagttttttttttttgttttttgatagttgatttagatgatgttattttttagtcgtgatgttgtttaagaaaattaaataaaattaattaaagaaatagtttatttgttggtagttgtgaattttttatttagtagttatagttattgtaagagtttaagtatttttttatggaggtattttgagtttttttttttttgtaagttaagtaattagtttcggttttttatttagtatataaattatggttatttattataaaagattggttttttatgtttaaatattgaaattttaggagattttgatatgtattttgttttaggaaatttttttgggtttatttttcgggttttttttgtttttgtttatatgttgttaaattttaaatggttgaataaatggtaaagagtagaaattatatttatttgatgttttttaaattttatgttttattgaaagtagttgagaaaatgaaaatttaaggtgattaatgtaaataaaaagatggtgatttttttttgtaaagataagtaagaagtagagatgtttttaaagatgttagcgataggtttatttgtagaaaagttaatagtttaaaatcgtatttagaaagttataagttgggaaaatatgtgatagagagaaaaggaatttaaagtattaggtttgtttggagatgttttgggattgttggcgtttttttgagttatgttgtttttttttcggagttttcgtgggtttttcgtgttttagatttattttttttttttttagttttagaattcgtgataaattttattggtgttatgggttgaattgtgttttatttttaaatttatatgttgaagttttaatttttagtattatagaatgtgattcgatttggagatagtttttaaatagatagttgagcgggatgtggtggtttatgtttgtaattttagtattttgggaggttaaggtgaacggattatttgaggttaggagtttgagattagtttggttttaaattttgtttgtattaaaaatagtagttagtacggtggtgtatatttgtaattttagttattcgggaggttgagatgggagaattgtttgaattcgggaggtagaggttgtagtgagttaagattgtattattgtattttagtttgggtaatagagtgagattgtgtttaaaaaaaaaaaaaagaggtagttgagttaaagtgaggttttgtgggtgggtttcgatttaatttaattggtgtttttataagaagaggaaatttggatacggatatatagggaagatcgtatgaagatataaggagatgataaatggggtaataggaaatagattattagttaattttatttgttattttttaaagttatttataagtttaggagagaggttttagacgtaattagttttgtttatattttgattttagatttgtatttttttaaaattgtaagatagtaagttatatagtcggtgatattttgttgtgatagttttagtaaataaatatattgggagatagtaattaaaatggttgaaagagtaaaatgtattgaaaaagaaaaaggagttaaggtcggtattttatgatttttatgtcgttttttttattatgtgtatacgtgtgtgtaaatttgcgtttattttttattgagttttttgttatttgtttatggatttttggttttttttgagagttattatttgttgttagtggaagtagagtatttattatttttagttagtgtagggaggttaggaggatttatggagttattgtaggaatataaattttgttttgtatagacggatattataaacgtatatgaataaattagggtagagtggaaaaaagatttattttttttttttttatgaatataggtatgggggttagtttcgatgtttagtgtgtgatttagtgggggaggaaggaagtttcgtgtttttatagtatagagaagttatttgtagaggtttattgaggattttttgtgaatgggttattagcgggtttggggttgggaggagttgtgataaggatttttgtgtttagtttagtgtacgattgttattttaattttttttttttttggagttgttgtgttttttttttttttgggtttttgtattgttgtttttgttatgtattggtttgttttgatatttttttttagtattatttgtatttattagttatattttaattttattgtgttgttattattgttggtttagttttagttataattaatggatggttattatgtgtaagtattttttattatttattttggttattattattattttcggtttattgatgaatagtcggaggtatatcgaggttaagttttttgtttaggattttttagtgttgggattttgattttagttgggttttaaaaggtatgatttaatttttattataaatgtgggtgattggtaattttatatgtattttgtagatgagaaaatagagtatttttttttttttttattttttagattttgtggttgtcgttgttgtttgtttaattgtttttgagagagaatttcgttttgtcgtttaggttggaatgtagtggtacgattttagtttattgtaatttttgtttttcgggtttaggtttttgttttagttttttaagtagttgggattatagatgtgtgttattataaatggttaatgtttgtattttttgtagagatggagttttattatgttgtttaggttggttttgaatttttgggtttaagcgattcgtttattttagttttttaaagtgttgggattataggtgtaagttattgtatttggtttagattttgtgttttgagtgttaggttttaggtaggtagttagttggttcgtgggtttagagggtgtgtggtttgtttaaagttagatagttagaatttttttgttttttatagttgttttttattatatgtagttgttgaatatttgaaatgtgtttggtttggttcggtgtggtggtttatatttgtaattttagtattttgggaggttaaggtgggtggattatttgaggttaggagttcgagattagtttggttaatatggtgaagtttcggttttattaaaaatagaaaaattagtttggtgtggtggtaggtatttgtaattttagttatttgggaggttgaggtaggagaattttttttttgggaggtagaggttgaagtgagttgagatttcgttattgtattttagtttgggtaataagagtgaaattttattttaaaaataaataaatagaaaaaatgtgttttgttcgaattgagatgtgttttaattgtaaaatatatattagattttaagacgttatagtatgaaaaaaaaatgtaaaatatttttttaagaattttaaaatattggttatatgttgagatgataatattttagataaatggggttataggaaatagagtgttagttaattttatttgtgtttttttacgtattgtggttattaggaaatgtaatatgatttatgtggtttatagattttggttggatggtattggatatgtggttgaggcgaggatgttttttgtggatttttttgtgttattttgagattgtttagaggtatcggttgttttttttgaattaagagtgatagtgtttaggtggggattattgatgagttggatatgtgagaagtagggagttagtacggggtatatttggaagatataaaaagtagagaggagttataattacgtgaatatattttatatttttgatttgtgtatttaaaagtggtgaggatgggtcgggcgtgttggtttatatttgtaattttagtattttgggaggtcgaggtaggcggattatttgaggttaggagtttgagattagtttggttaatatggagaaattttgtttttattaaaaatataaaaattagttaggcgtggtggtgggtatttgtagttttagttattagggaggttgaggtgggaggattatttgaattcgggagacggaggttgtagtgagttgagatcgcgttattgtaattttagtttgggtgatagagcgagtttttattttaaaagaaaaaaaaaatggtgaggatagtaatttttatttaggtgtttttatcgtaataaaaaaattttttttaaatgaataaaaatttaaggagtatgtgttttattatgattattgtataaaagtatttaaagaatgaaaattttatttgattataggtaattgggttaaataaaaattgatagaatgtaagttagttaaaataaattttgttttaagaaaaaaaaagtggagagggaggtgtgggtgggagtgggggtttgttggtagtagattatgaaggatttttaattttttatcgaggaatttggattttatttagacgatgatcgtaattgtttttagaaagaagattgtggggttttagcgcgtgaaagtgttgaaagtcgggagggtgggggagtgttaggggtttgtaaggaggttggttagggtagggtggtggttaggaaggaatttttcggaggagatttggtaatttatcgtaggggaggggtaaggggaaaggggatgaatcggtcgggtaataggtggggagaaggtaggttttagcgaggaggaacggttgtgaatgtgtgatttttgaaaggtagggagggagagtggggtgtaggttgtttattacgtcggggtgtttagttgggatttttagtaagtttttcgttatggttggcgaggggtggttgtgtataattagtttattgttttttggatttcgtggatttgtttgtttttagattatgttatttgaggttttttttttgttgttgcggagttatattttggatgattaaagatggggtagagttggaagagattgggaatagatagggttattggggaatgggagtgtttgaggatttaagattattgggtgtttagggttttttttgttaatatatttattagttgtgttttaggagttaaatattttggggtatattaagatgaattatatacggttttaaaaaatttgtaaattgggtttttttgatatttttttaaattaaagagataggatgttagtattatttgttttaataatatttatttttttttaagattttcgagttttgtgtattgtaagtgggtagtatttcggagggattgagggttaattttatttttgtggataataaatgtattttggataaaggaagaatatatattttaattaagtagtagttttttgataagaattttagtaattgtataagttttatcgttgtttgtatagtttagtaattttattttgttattttaatatttttcgttttgtattttttttttgtaggaattagtttttagttttttattagtaggatacgtttttagggtgatttgtttattgaattggggttggagtttaggcgtagaggattttcgggaaagtggtttgagaatttttttgggtgggcgtgggagggttttttagttttgcgttgggagttgttattgttttttttttagttttgttttttgtttttgtttagtatttggttttgttagtatcgttaagattagttttaatgagttttgttgtttaaattggggaaggaaatttttttttttaataaaaaggcgaattttagtttagtagtaggagggtggttagtggggagttaggggttagaggtagttgagttttgttatataaatagtagtaattaatgggtttttgtaaaagatagggatgtgtgtgtttgttgtttagtatcgtttttttgtaaatcggagtaatattgaaattaattataaagttagtaaaggttattttttgttttttgttaaataagtattgtttatataggagtacgttttattcggatgtatttatttatatcgtttttttggaagatggcgtgaaattaatttatttttaaaattttttattgggttatgttaattattatagtttttagtttttttatgcggaatttaggtttgggttggagtcgggagtcgggagtttttaggtttttgttattttttttattgttttgggggttttttttttgtttattttgtttaaattattttttttagtgttgttaattaggtttgaatttttatgatgagatttataaagtaagttattttgttattattaataattattataaaggttttataaaggttttgttttggtttgttggggttagtatagtaaataatatagatttggggggtttttaataatagatattgatgttgtttgagttttgtaggttggaaatttgagattaaggggttagtaggtttggttttttttgaggttttttttttttggttgattgaaggttgtttttttattgtgttttcgtatagatattttttgtatttttatttttggtgttttttttttcgtattaagatattagttttgttggattagggtattatttttatgtttttatttaattttatttttttgtttaaaggttttgtttttaaatatagttatttttttgtatttgtagggattggttttaggatatttttttttttttttttttgagattgagttttattttattatttaggttggagtataatggcgcgatttcggtttatcgtaatttttgttttttaggtttaagtgattgttgtgttttagttttttaagtagttgggattataggtatgcgttattacgtttgattaatttttgtatttttaatagaaacggggttttgttatgttagttaggttggtttcgaatttttaattttaggtgatttgtttgtttttgttttttaaagtgttgggtaggatttttttttgatattagagtttaaggatgtttaagtttttgataataaatagtgttatatttgtatatattttatatatatttttttgtatattttaaattatttttattttatttagaatatttaatgtaatgtttatatattattttatttacgtggatttaatttagtatttggtatgcggtaaatttaagttttgtttattggaattttgtgaattattttttttaatatttttgatttgaggttggaatttatggaaggttaattgtataattatattggggttggaattttgggggaggatacgatttagtttataatagattttgaaatagttaatagatttttttttttttaattgtacgtggatttatttatttaagaaatatttattgagcgtcgtttgtgtgcgggggttgttttggatgtggtaagtatgttagtgagggattatttttttttttttggggtttttaagcgttaggtagattttatgtttatttagttttgtgggattttagaggtgataagtgttatggaataaatagtttcggggtataggggttgtgagttttagatgatgtggttataagtgggtgagttagggaagtttttttgagagttgatatttcgttaggattttagaggttgagggagtgttatgtggttaagatttttaggagggaatatttttgtttttgttgttgaggaataacgaggaggcgggttaagtcgagggagtcgtgggttgtttgatgggagtggcgtaggtatttttatgacgtggatttttttttttgggagttacggggagtttgggtgtgtttttatggtttttatttttgggtagtttttttgtttttttagattcgttgttttggagaaggtgatagtttagataagtttgggagagagatggggtgtttattaaggggattatttagaattagatattggtatgttaggaattttaggggggcgtgtgggggttggtggtgaagaatgagggtttttttgttatggatcgtttgttgtaatgttgcgtttgtgaggtttttttattattttttttttttatgttttgtttttaatttttagttatatttttaggaagtgagaaattattttttgtagtaggaaaaggttggacggtaagtagggacgatagttattgttttgggtttagcgcggattttaaatttttgtttttgttgggatttttttagagttgttcggttttttcgtatttattttttagtattggtatttggcgttagttgtacggttgttgtttattttaaattggaatttggaagaaatatttgggattggggttggtcgtggttatgtatttgttttttttttatcgtttttttttttttattttttttttaggtttatgttggttttgttgttatttagggtatgttgatggagttttttttaggtttttgacgcggtgttggatattggatacgttaggtttagttatttttgaaatgatcgagggtttggtgtttggaagggggttttgaaagtgttttaggaaaagaatgggtttggttttgaaaaagggtgagaaggagttaaaagggttgattttagtaggggtttggagatgggagaattttttgtggtgacgaaggaaaatttattgtagtttagtgagttataggggaaaatagggttaggagattgtgaatgtttcggtcgggggaggagaggggtagagttgtaattaggttggttggggaagtttttttgagaaggggatatttttttttttttgttcgagatagggttttattttgttttttaggttggagtgtagtggtgtgattacggtttattgtagcgttaattttttagggttaagttttttttttacgttagttttttaaggagttgggaatataggtttgtattattatagttggttaagtttttgtatttgtttggtagagacggggttttattgtgtggtttagattggtttggaatttttgggtttaagttatttgtttgggggatattttttatatagaggtttgtcgattttgtattacgatcgtatataagttgaaacggtgtttatagatagtatttatatttgatttaaatgattttaatgtttgaagggaaggtattggtttgtttatattgtaattgggaaatttgagggttgaagtcgtgggattttttaaggtagtagtagagatggttaagaatttatattggttttttgtagtgttttggtgggattttttatatatgtatttatttatttattgatttttttttttttttgtttttatgagtttagtattgttttagggtgttgggaggttagatattatttttatttttatggaaagtatagtggagggtattatagtagttaagcgtgtgtgtgatgggtgtgatagttggagaggttcggagtgattttagttagtttggatggggaagtaaattgtaatttgaggttagtggcgggtgggaattggggttgatttggttaagagtgtgtgggagggaattttaggttgggttgggtgggagtgggagataggaggtagagagattagtagggaggtttaattttgttcgagggatgatggtggggttgtagtaggggagtataggaaggaaggggaaggggagggaaattgtttaaggtggaggtgatagatttttggtgatgaatgaggtgtgggaataggggtagggtggttggaggaggatgttatagtagggttatttgtggatggttattgtaggttgagttgggagttttagagaggagttggggtcgggggaggtgataggttcggaggtttatagattatttaggtggagatggttagaggtacgttagagtttaggaagaggtgtgagtaggataggtattggtatttatgggtagatggatagttatgagcgtgttggaagtggaggggtggacgcgtgtttttttagtagaggaaggtttgggatagaattttagggaggttattgggggagaagtaggaggtgtgggatttgggagggtaagtagggtgtgagaggttagtagggagagtagttttcgggtgttagggattttggtgaggtagttatagggagtagtgggagtggtagttcggggtaggggttgtttgggttttcgtgtttatttatttttttgaattaaatacgtagagtttattgattattatttattgaggattttgatgaatgtttttagagttagggtttgtagttttagaggttgtgtgtttagttgttgttgttgtgacgtttttagattggggaaggtaggaggagagtggaagaggaattgtaagatttggttttaggtcgggcgtagtggtttatgtttgtaattttagtattttgggaggttaaggcgggcggattatttgtggttaggagtttaagattagtttgattaatatggagaaatttcgtttttattaaaaatataaaattagtcgggtatggtggtttatttttgtaattttagttattcgggaaggttgaggtaggagaatcgtttgaatttaggaggtggagattgtagtgagttgagattttgttattgtattttagtttgggtaataagagtgaaattttgttttaaaaaaaaaaaaaaaaaaaaaaaaaaaaagattcggttttagttcgtagtgaatgaatgttagttttttgtttttatatttttatttttttgtagggaatttcgtagaattgtaggatgtttagatggtttattagtttgtttaggttgttataataaaatattatggagtgggtggtttaaaataatagaaatttatgttttatagttttggagtttggaagtttgagattaaggtgttagcggggttggttttttttaaggttttttttttggtttttagatgattgttttttttttgtgtttttatatgatttttttgtgtaggtttagagatagagagagttttggtgtttttttttttttttataaggatatcggttttattggattagagttttattttaatgattttatttaacgttaataatttttttaaagtttttttttttaaatatagttacgttgggggttagggttttaatatacgtaatttagtttattgtagatggtaattttgaattatgataaagaatttgaattattttttttttttcgataaatggttttaaagatttaggatttttttatagtataggttaattattttttatttgtttgggattagaagtgttttagatttgggatttttttttttttttttatatttgtttagtatttagtggagtattttttattttaaatattttagtgattattttttataggtgtcgtgttgatgtttaataagttttagattttggaatatgttggattttgggtttttaggttagagattagagatgtttaatttgtatatatttatatttagaattttggtaggtatattttaggtgtttaataaatgtttgttgaagaaggaaagatttatttgagtttagtatatagtatttattaagaaattaaagtgttttgggaagaaagtttttttggggataatttttatatgaaaagaaaatttagttgattagggttttttattttttgtgtattttgattatttaaaatatggtgtaaaagtgttttgattaaggaaaggttatgaattttttaaaatatagtatattgtataatgtgtaaaatatatatgtatatttttgcgatattaaagaggagtttttttgattagtatatttttttttttttttttagttgtatagaagatttattttatatttgattttttattttggagattggatatattaatatttgatgtgttttagagtaatgaattttaaaggtagtgaagggtgatataggaggaagggatgaatttaaaattttgttaattttgattttatgtagatagttttagttaagttaatatttaaagaagatgagagattcgtttgataggaagttattgttttgggatttaaaagttattttattttagagagttgaaaattttgagatagagtttagtttttttttttaatatgttgaagttatcggttaaggaaatgtatattgttttttttagttgaattgagtttgaatgtttatttattttttttacgggttgatttattgaaagtaaattggtaatgataataatagtattaatttaaggagtatttcgtatgtgttagatattgtattaagtgttttttttttttttttttttttttttttttgagacggagtttcgttttgtcgtttaggttggagtgtagcggcgcgattttagtttattgtaagtttcgtttttcgggtttatgttatttttttgttttagtttttcgagtagttgggattataggtatttattattatattcggttaattttttgtatttttagtagagacggggttttattatgttagttaggatggtttcgatttgttggtttcgttattcgttcgtttcggttttttaaagtgttgggattataggtgtgagttattgcgttcggttttaagtgttttttttatgtatattattttagggattattggtagatggaagtgtgtgttattatcgggtgtattattgggtttgggtgattttgagtattttttattttaagtaaaattttatattggattttttttttttaatatttaataaaggtcgttaagtatggatttttcggtagttagtaagtgattttttttttgatgggttgggatttatatatatggttttttttttttgttttgtgttggggagagtagtgtttttttttcgtgtagggtaaatttttttttttttttttttttttttttaaggttttttttttttttttttttttttttttttgagatggagttttgttttgttatttaggttggagtgtaatggagtttttttggtttattgtaggttttgttttttaggtttaagtgatttttttgttttagttttttaagtagttgggattataggtatgtattattacgtttagataatttttgtatttttagtagagatggggttttattatgttgtttaggttggttttaaatttttgattttaagttattattagttttagttttttaaagtgttggggtgataggtgtgagttattatattcggtcgggttttttttttttttgttttttttgtattttgtatttcgttatttttgtagttgttgttagtgattttttggttttgggggatttttattgtttttttatgagtttagttatttatttaaaagtggtttgttgattttatttattattattgattggtggtgtttgtttggtagggaaggaggagggtggagttatcgtgttgtgagaaatgttttttgttttttttttttttgagatagggttttattttgtcgtttaggtttgagtgtagtggtgagattataggttattatagtttggaatttttagatttaagcgatttttttattttagtttttcgagtagttgggattattggtacgagttattacgtttggttaatttttgtgagatgaggtttcgttatgttgtataagttgttattttttaattaataaaagaagttgatgaataattttttttaattgttatatattggaattgtgtttttttttttttattaattttttattattgtaggattttgttattaatttttttggaaatatgggggaaatttttggaaaattgatttttttgtaaaattttgaaaaggtttgtaatttggatttgttgatgagtttcggttttattgatttttgatagaaagttgttttttttgtgtttatgatgatatttaggtttagatatttttttgaaatttttatttttaaatatatatatatatatatatatatatatatatatatatatatatatatatatatatatatatatatttttggattgaattgggagttttttggcggtattggttgggggttttatttttaagtgaatcggggaatttgtagcgttggtaagagttattgattggtgtggtgttattatttttgttgtttggaatatgttaaatttgtttattttattgttatttgatagtaaagatttaattttattttgtaaaattttttcgatttaagtagtttattttgtagttagagatttattattgtattaggttttatttagttagagttagtgttagttttgttttgtttgtaaatttttgattattgttaaattgaattagatgtttttttttgttgattattgattgatttttttttaattttttatttattttttttttttattttagttgttatagatgaagtcgattaaatggttttgtgtaattaagaacggtattttattttagtattattaatttgtaagtatggagtttgtaagttagggggtggatgaaaataagttgataatgagttggtatttgaaaattgagagggagtttaataggaaattttttttaaggtgaggtagtttaagggtttagggtttttatggagggaattttgatggtagaatttgggaattaaggtgttagatgatggtagggtatatattaggggtgttagttttttgtagttgttgtaataaatgattataaatttggtggtttaaaataatagaaagtgatttttttatagtttggaggttggaagtttaaaattagttttattggagattaaggtgttagtagggttacgttttttttagagatttaaggggagatttggattttgtttttttttttagtttttggtggttgttatgggtattttttgggtttgtggttatgttatttttttgttttcgtttttattttgtttttttttttgtttgtttatttgatttttttcgttttttaaagatatttttgatggtatttaggatttatttagttaatttaggatagtttttttatttgaagattattaattttattatgtttgtagagttttatttttttaaagatgatatttttaggttttagggattaggatgtgggtttatttttgggaggttatttttcgatttattatattgggtttgttttacggaaggttttggtacgacggtttaaggtttgggttggattgagtggtatgaggttgaggggttggattgagcggtatgaggaggaggggttggattgagcggtatgaggaggaggggttggattgagcggtatgaggaggaggggttggattgagcggtatgaggatgaggggttggattgagcggtatgaggaggaggggttggattgagcggtatgaggatgaggggttggattgagcggtatgaggaggaggggttggattgagcggtatgaggttgaggggttggattgagcggtatgaggaggaggggttggaatgagtggtatgaggatgaggggttggatggggtttttagggggtatttttttagtattatagattattttattgttttgtttttttatttttaggaaagggaggaggatgggttagagaaagagtaagaagtgagagagtggggagaaatgtttggaaatattgtatttgtatagaagttggaaggtataggaagaattgtttaaagaaaagtttagtatgtatttttaagtttggtatgtgggaattaatattaattgttaggatgattgtaatcgtacggttgtgataatgaggtttagatttatggaaagagttatttgggttgttttttttgtttagagtggtttgtagtgtagatatttgttaattaattgtggagttttatagggttttattttgatatagtttatggaggtgtaaaattttgatatgggttggtttagttttgggagtggagtttgagagggagttcgtgaagattttgtttttcgtgggttttatggacgtgcgggagtagaggggacggtggagttaatgaggaattgttagaggtttttgagattacgttgaagggttagagtgaggaggagagagaggttgtcggtgaaaggtggcgttattttttattgttaaggagggtttttttatgtttggaaatgcgttttaaagggtattagatagattttttatatttttagggaagttatttgttttttgtggttgttataataaattattattttggtggtttaaagtaataaattgatttttttatagttttggaggttagaagttttaaaaagtattggtagggttacgttttttttagagattttaggggaggatttttttttgttttttttggtttttagtggtagttaatattttttggtttgtcgttttttattttaatgtttgtttttttttttttgtggttgttttttttgtttatttgtgtgaaaattttttttttttttattttataaggatatttatgaggatatttagggtttatttaggtaatttaggttaattttattttagaattttttatttaataatttttgtaaagattttttttttaaataaagttatatgatttagagattaggttattatttaatttggtataggtaattgaagaatttaataaggtattttaattataattgtgtattttgttaaaaaggtagattgtattattgttgggtttttagatttgtttgtttatagtatttgtaagaattttattgttagagggtgtaattttttagatattgttatacggagtggagtaaagataatgtttaattgtattttttagtatttttttttttttatttttttaagaggatggatatgaaatatgtgtgtgtttatgtgtttttggagggtaatagttaataaagttgttagtttagtattttttgaattatttggggttagatatagttagagtgtaattttattttttgggggttgagagtattagttcgagttgatttgaggtagtgtaggttttatgttgtgaggtgtggatggtaggggtttttttagtttgtttggtttttttgggggttgattgattttttgttatttttatttttggattaagggtttgaatttttttattaaaatgagattttgggttgggtacggtggtttatttttataattttcgtatttggggaggttaaggtgggcggattatttgaggttaggagtttgagattagtttggttaatatggttaaattttgtttttattaaaaatataaaaattagttggatgtggtggcgggtgtttgtaattttagttatttaggaggttgaggtaggagaattgtttgaattcgggaggtagaggttgtagggagtcgttaagattgtgttattgtattttagtttgggttatagagcgagattttattttaaaaaaaaaaaaaaaaaaaaaaaaaaaagaaggagatattgttttatagaggagataatatattatgttgtttatagttatttttgttttggtgattttattggttagttattattagttatttgttgtttatgaagcgttgtgtgtcgtgaagggggagtggtttttgtattaagttatgatttatattttattgtagatgttgttgtatagggacgtagggaaggaaggtgcgggggagtttttttggtagggaggttagtttttgaaggatttggggttgggggtttgagtgggggaagggggtggttggagtatttggagagtgatagaatgtatgttttagggagtgataagatatgttaggagggagagttgggaggagttgggatcgggtggtggtggggttgatggagaagatgtttgggtgtttttataggtagtagtgagattttaagagtttttgtaagaaattagagttttagatttattgatttggaggtagagtgtagaatgaatttaagaggttaggaggagttttaagaagaggtgatatttatgttttagtttattttgggggtggttagatttttattgattcgtttattattttgtttaatttaaagtttgtttttagtttggatttttttttttttttgttttttttttgttttttaaggttttttttagttttattgaggtttaattgatagataatcgcgtgtgtttatagtatgtaggttatgataagtgagtatgttgtgaaatggttattatggttaagtttatggatatgtttattatttgatagggttattagttttgtgtgtgttttgagaatattaaaaaattttttagtaattttttttttttttttttgagatggagttttgtttttgttgtttaggttggagtgtaatggtataatttttgtttattgtaatttttattttttaggtttaagcgatttttttgttttagttttttgagtagttgggattttaggcgtttattattatatttagttaatttttatatttttagtagagatagggtttcgttatgttggttagattggtttcgaatttttgattttaagtgatttattcgttttggttttttaaagtgttgggattataggtataagttatcgtgtttagttttttagtagttttttttttttttttttgagacggagttttgtttttgttgtttagtttggagtgtaatggtataattttgggttattgtaatttttattttttgggtttaagcgatttttttgtttaagtttttcgagtagttgggattttaggtatttattattacgtttatttaatttttgtgtttttagtagagatagggttttattatgttggtcgggttggttttgaatttttgattttaagtaatttatttttttcggttttttaaagtgttgggattataggtacgagttattacgttcggttttttagtagtttttaagtgtgtaatatattattgttaagtttggttattatgttgtatattggattttagatttttgtttttttttttattatgaattatgtttataaaataatatttgagttttttattgaaaatatgtatttatttgtatttatttatttattatttatttttgtatttgtatttttgtgtatggtatattgtatataatgtatattgagtgcgttgtgaaataggtataaaatgtaattataaaaaagagaaataataagaaatggaaggtttattgattttattttgtattcggaggttttatagttgtgtatgaaggtgtttttgggatgtttatgttttagtttatgatagggtatttgggtattggggtagtggttggaatgaattaggcgggtggtgtaggggaatagagaggaaggataggtggcgagatagttggaagaagatattgatattatgtgttgacgttagtggttgattatattagagaggggagtgaagaaaaaagaaggaatagggtagtcggcgtggtgatttacgtttttgacgtcggtgttttgggaggttgataaggagaattattggaagttaggagtttaagattagtttgggttatatggggagatcggtttttataaaaagaaaaaaattagttagtcgtggtggtgtgtgtttatagttttagtttttgggaggttgaggtgggaggattatttaagtttaggagtttgaggttttagtgagttatgattgtattatgtattttagtttgggtaatagagagattttgttaagaaggaaagaaagagaaaaagagagagatagaagaagaaagaaaggaaggaaggaaagaggaaggggagggagagagggaaggagggaggaagggagggaggaaggaaggaaggaaagaaggaaggaaggaaggaagcgagggagggagggagggagggagggaagggaaggaaaagggtgaatataatggagaggtgattttttttaaaggaaagaggattggggatagatgcggatttgggtggaatagataatttttttttttttttgtttttttatttttttttttgttttttttttttttttatcgtattttttatgataagttgattgtaggggtaatggtttaggaggagttttttgagggtagtagaaatgtgattttgagtaataataaaggttgggttttgatagtgggggttaagtttttttaggaggtaatttattaagggaaggaggtagattttgaggtttgagggtgtgtatagggtagggcggagcgggggcgggtaaggttaggggtgttgtatttttgggtagtgttttttaattatgttttggaattaagattgggggaagatttagttgtttttgaagtggttgggggtttttagatttggagggagatgatggtgagttttgagggggattgggataagttttttgttggaagagaaattgttattttatttttttattttgtagaaaaataaatttgatattaattttgtattgtgttttttagatagttatttaggtttttttaggtaaattttattgttttttttaataattggattttttgattttttttaatgttgtatttatatgtgtgtgtgtgtgtgtgtttgtgtggtatatgtataaatataaatgtgtatatatatattttttgttgatgttgttttaggtaaggtgttttttttttgtagagatatagttagtattttttttgggtttttgtgagtagttaaggtatcgttattgtttgtaatgtttgataataggtatgtttttgttttttttttagg

SEQ ID NO: 520 - DNA, 56153 bp, Artificial Sequence
  chemically treated genomic DNA (Homo sapiens)
tttaaggagaaaataagaatatgtttgttattagatattatagataatagcgatgttttggttatttataggaatttaagaaaaatgttagttatgtttttgtagaggagaaatattttatttaaaatagtattaatagaaaatatatatatatatatttatatttatgtatatattatataaatatatatatatatatatatataggtataatattaggaaaaattaaaaggtttaattattaaggaagataatggaatttatttaagaaaatttgaatggttgtttggaaggtatagtgtaggattaatgttaaatttatttttttataggatgggaagatgaaataataattttttttttagtaaagggtttgttttagttttttttaggatttattattatttttttttaggtttgaggatttttagttattttagaaatagttaaatttttttttaattttagttttaaggtatggttgggggatattgtttaaagatgtagtatttttagttttgttcgttttcgtttcgttttgttttgtgtatatttttaagttttagggtttattttttttttttgatgaattgttttttagggaaatttggtttttattgttaggatttaatttttgttgttatttaggattatatttttattatttttaggaagttttttttgggttattgtttttataattaatttgttataagaggtacggtgggagggagggaagaatagaaggaaggatggaggaatagagggaagggaagattgtttattttatttaaattcgtatttgtttttagtttttttttttttaggggaagttatttttttattgtatttattttttttttttttttttttttttttttttttttttttttcgttttttttttttttttttttttttttttttttttttttttttttttttttttttttttttttttttttttttttttttttttttttttttttttttttttttttttttattttttttttttttttttttttttttttttgatagagtttttttgttgtttaggttggagtatatggtgtaattatggtttattgaagttttaaatttttgggtttaagtgatttttttattttagttttttaggagttgggattataagtatatattattacggttggttaatttttttttttttgtagagatcgatttttttatgtggtttaggttggttttgaatttttggtttttagtgattttttttgttagttttttaaagtatcggcgttaaaggcgtgagttattacgtcggttgttttgtttttttttttttttttatttttttttttaatgtgattagttattgacgttaatatatgatgttaatgtttttttttagttgtttcgttatttgttttttttttttgtttttttatattattcgtttggtttattttaattattgttttagtgtttagatgttttgttatgaattgagatatgagtattttaggaatatttttatatatagttatggagttttcgggtgtaggatgaagttagtggattttttattttttgttattttttttttttgtaattatattttgtatttgttttataacgtatttaatatgtattatatgtaatatgttatatatagaggtataagtatagaaataaataataagtaaataaatatagatgaatatatgtttttagtgaggggtttaaatattattttgtggatatagtttatgataaagaaaaaaatagaagtttgagatttaatgtatagtatggtgattaggtttaataataatgtattgtatatttgaaaattgttaagaggtcgggcgtggtggttcgtgtttgtaattttaatattttgggaggtcgaggagggtgaattatttgaggttaggagtttaagattagttcggttaatatggtgaaattttgtttttattaaaaatataaaaattagatgggcgtggtggtggatgtttggaattttagttattcgggaggtttaggtaggagaatcgtttgaatttaggaggtagaagttgtagtgatttaagattgtgttattgtattttagattgggtaataagaataaaatttcgttttaaaaaaaaagaaagaaaattgttaagaggttgggtacggtggtttgtgtttgtaattttagtattttgggaggttaaggcgggtggattatttgaggttaggggttcgagattagtttggttaatatggcgaaattttgtttttattaaaaatataaaaattagttgggtgtggtggtggacgtttggaattttagttatttaggaggttgaggtaggagaatcgtttgaatttgggaggtagaggttgtagtgagtagagattgtgttattgtattttagtttgggtaataagaataaaattttattttaaaaaaaaagaaagaaaattgttgagagattttttaatgtttttaagatatatataaaattgataattttgttaggtaatggatatgtttatgagtttgattatggtaattattttataatatgtttatttattataatttgtatattataagtatacgcggttatttgttagttaaattttaataaagttgaagaaaattttaaaaaataaaaagaaaataaaaaagggaaaaagtttaaattaaaggtaaattttaaattaaataaaatagtgaacgaattaataaaagtttggttatttttagggtgaattaaggtatggatgttatttttttttgaggttttttttggttttttgaatttattttatattttgtttttaaattagtgggtttagaattttgattttttgtagaagtttttgaggttttattgttgtttatgggagtatttaagtattttttttattagttttattattattcggttttaattttttttagtttttttttttggtatgttttgttattttttgggatatgtattttattattttttaggtattttagttattttttttttttatttaagtttttaattttaggttttttagaggttaatttttttattagagagattttttcgtattttttttttttacgtttttatataatagtatttgtagtaagatgtaagttatggtttaatgtagggattattttttttttacgatatatagcgttttataaatagtaagtgattaatagtgattaattaatggaattattaaagtaaagatggttataaatagtataatgtattattttttttatagagtagtgttttttttttttttttttttttttttttttttttttgagatggaatttcgttttgtggtttaggttggaatgtagtggtataattttggcggttttttgtaatttttgtttttcgggtttaagtaatttttttgttttagttttttgagtagttgggattataggtattcgttattatatttagttaatttttgtatttttagtagagatagggtttggttatgttggttaggttagttttaaatttttggttttaagtgattcgtttattttggtttttttaagtgcggggattataggaatgagttatcgtgtttagtttagagttttattttaatagggaggtttaggtttttaatttaaagatgggagtaataaagagttaattagtttttaaggggattagataggttagaagagtttttgttatttatattttatagtatggggtttgtattattttaagttagttcgggttgatgtttttagtttttaggaggtaaagttatattttggttgtgtttggttttaagtagtttaagggatgttaaattaatagttttgttaattgttattttttaaaaatatatagatatatatatattttatatttatttttttggggaggtggagaaaaaagaatgttgaaaagtataattaggtattgtttttgttttatttcgtgtggtagtatttaaaaaattatattttttggtaatgaaatttttataagtattgtaaataaataagtttaaaggtttagtagtaatataatttgtttttttaatagagtatataattatagttaagatattttattgagttttttaattgtttgtattaggttgaataatggtttaatttttggattatgtgattttatttggaaaaagggtttttgtagaagttattaagtgaagaattttgagatgagattagtttagattatttgggtaggttttaaatgtttttataagtgtttttataaaatagagaaagaaggagtttttatataaataagtagagggggtagttataggaggaaggaggtagatattggggtgaggggcgataagttaaggaatgttggttgttattggaagttagaagaggtagggaaggatttttttttagagtttttggagggagcgtggttttgttaatattttttaagatttttggtttttagaattgtgagagaattaatttgttattttaagttattagagtggtaatttgttatagtagttataaggaataaatagtttttttgaaaatataaggaatttatttgatgttttttgggacgtatttttaggtatggagagattttttttggtagtggggaatgacgttattttttatcggtagttttttttttttttttattttagttttttagcgtagttttaggagtttttgataattttttattgattttatcgttttttttgttttcgtacgtttatgagatttacggagagtagagtttttacgaatttttttttaggttttatttttagggttgaattagtttatattagggttttgtatttttatgagttatgttaaaataggattttatgaagttttataattggttagtaagtgtttatattgtagattattttgaatagaaaggatagtttaggtggttttttttatgaatttagattttattattatagtcgtacgattatagttattttaataattggtgttggtttttatatgttaggtttaagggtgtatgttaggtttttttttaggtagttttttttgtattttttaatttttgtgtaaatgtagtatttttaagtatttttttttatttttttattttttgttttttttttagtttattttttttttttttttgaaggtgaaaggataaggtaatgaggtgatttatggtgttggggaaatattttttggaaattttatttagttttttatttttatattatttattttagttttttttttttatatcgtttagtttagttttttaattttatatcgtttagtttagttttttttttttatatcgtttagtttagttttttatttttatatcgtttagtttagttttttttttttatatcgtttagtttagttttttatttttatatcgtttagtttagttttttttttttatatcgtttagtttagttttttttttttatatcgtttagtttagttttttttttttatatcgtttagtttagttttttaattttatattatttagtttagtttaggttttgggtcgtcgtattaaggtttttcgtgaagtaggtttagtgtggtaagtcgaaaaatggttttttaaagataggtttatattttaatttttggaatttgaaaatgttatttttagggggatgggattttgtagatatgatgaagttaatggtttttagatggggaggttgttttggattaattgggtgagttttaaatgttattaaaaatgtttttaaaagacggaggggattagatggataagtagagaagaaagtaaagtgaagacggagataagagaataatatggttataagtttaggagatgtttatggtagttattaggggttgggagaagaagtaaagtttaagtttttttttaggtttttggaggaagcgtggttttattgatattttgatttttaatgagattgattttggatttttagtttttagattgtgagggaattattttttgttgttttaagttattaagtttgtggttatttgttatagtagttgtaggaaattaatatttttggtgtgtgttttattattatttgatattttgatttttaagttttgttattaaggttttttttatgaaaattttgagtttttaagttattttattttggagaaggttttttattaagtttttttttaatttttaaatattagtttattattagtttgtttttatttattttttgatttataagttttatatttataagttgataatattgaaatggaatgtcgtttttgattatataaaattatttaatcgattttatttataataattgaaatggggaaaaaaaatgaatgggaaattaaggaaaagttaattagtgattagtaaagggagatatttaatttaatttgatagtaattagaggtttgtaggtaaaataaagttaatattgattttaattgggtaaagtttaatgtaataatggatttttagttgtaaaataaattatttgagtcgggggagttttatagagtgaaattaaatttttgttattaaatggtagtaaaataagtaagtttagtatgttttaggtaataggagtgatagtattatattaattaatggtttttattaacgttgtaggtttttcgatttatttaaggatgaggtttttagttaatgtcgttagggaatttttaatttagtttaggggtgtgtgtgtgtgtgtgtgtgtgtgtgtgtgtgtgtgtgtgtgtgtgtgtgtgtgtgtgtgtatgtttgggaatgggagttttaggagggtatttaagtttggatgttattatgagtataagaaaaataattttttgttaaagattagtaaaatcgagatttattaatagatttaagttgtaagtttttttaaaattttataaaggaattagttttttaaagattttttttatatttttaagaagattagtagtaaagttttgtagtggtggaaaattagtagaaagagaagagtatagttttaatatatgatagttgaaagagattatttattaattttttttattaattaagaaatagtagtttgtgtaatatggcgaaattttattttataaaaattaattaggcgtggtggttcgtgttagtagttttagttgttcgggaggttgaggtgagaggatcgtttgagtttgggagttttaggttgtagtgatttatgattttattattgtatttaagtttgggcgatagagtgagattttgttttagaaaaaggaaaaatagaaagtattttttataatacggtaattttatttttttttttttttgttaaataaatattattaattaatgatgatggataaaattagtaaattatttttaaataaatagttaagtttataagaaagtaatggaaattttttaaggttaaaaaattattagtagtagttatagagataacgaaatataagatgtaggagagatagaaagagaggaaattcggtcgggtgtggtggtttatatttgttattttagtattttgggaggttgaggttggtgataatttgaggttaggagtttgagattagtttgggtaatatggtgaaattttatttttattaaaaatataaaaattatttgggcgtggtggtgtatgtttgtagttttagttatttgggaggttgaggtaggagaattatttgaatttgggaggtagagtttgtagtgagttaagaaagttttattgtattttagtttgggtgatagagtaagattttattttagaaaaaaaaaaaaagaaagagagaggaaattttaaggaaggagaggaagaggaggaagagtttgttttgtacgaaagggaagtattgttttttttaatataggataggaggaagaggttatgtgtgtggattttaatttattaggagagaggttatttgttgattgtcgaggaatttatgtttgacggtttttgttaggtattaggagaaaaaaatttaatgtagaattttatttagaataagggatgtttaaaattatttaggtttagtaatgtattcggtaatgatatatatttttatttattaatagtttttaagataatgtatataaagaaagtatttagggtcgggcgtaatggtttatatttgtaattttagtattttgggaggtcgaggcgggcggataacgaggttagtagatcgagattattttggttaatatggtgaaatttcgtttttattaaaaatataaaaaattagtcgggtatggtggtgggtgtttgtagttttagttattcgggaggttgaggtaggagaatggtatgaattcgggaggcggagtttgtagtgagttgagatcgcgtcgttgtattttagtttgggcgatagagcgagatttcgttttaaaaaaaaaaaaaaaaaaaaaaaaagaaagtatttagtataatgtttggtatatacgaagtgttttttaaattgatgttgttattattattattaatttatttttaatgaattaattcgtagagagggtgaataagtatttaagtttagtttagttaaggaaaataatatgtatttttttgatcggtggttttagtatattaaaaaagaaggttgaattttattttagggtttttaattttttggaatagagtagtttttaaattttaaggtagtgattttttattaggcgagttttttattttttttaaatattgatttagttgagattgtttatataggattagagttaataggattttaaatttattttttttttttgtattattttttattgtttttaaaatttattattttgaaatatattaagtattgatgtatttaatttttaaaatgagaagttagatgtaaaatggattttttgtataattgagaggaagaaaaaaaatatattgattaaagagatttttttttaatatcgtagaaatatatatatgtgttttatatattatataatgtgttgtattttagaaagtttatagtttttttttaattaaagtatttttatattatgttttaaataattaaaatgtatagggaatgggaagttttgattaattgagttttttttttatatggaaattatttttaaaaaagttttttttttagaatattttggttttttaatgaatattgtatattaaatttaaatgaatttttttttttttaataaatatttattaaatatttaaaatatatttgttagggttttaggtataagtgtatgtaggttgaatatttttaatttttaatttgaaaatttaaaatttaatatgttttaaaatttgaaatttgttaagtattaatacgatatttgtagaaaatggttattggagtatttggaatgaagggtgttttattggatattaagtaaatataaaaaaaaaaaaaaaaattttaaatttaaaatatttttggttttaagtagataagagataattaatttgtattataaaagagttttggatttttaggattatttgtcggggaggggaggataatttagattttttgttatggtttaagattgttatttgtaatagattgaattgcgtatgttgaagttttaatttttaacgtgattgtatttaaagagagagattttaaagaggttattaacgttaaatgaggttattagagtggggttttaatttagtaggatcgatgtttttataagaaggagaagagatattagaattttttttgtttttgagtttgtatagaaaggttatgtgaggatatagagagaaggtagttatttagaagttaaggggagagttttgggagaaattaatttcgttggtattttgattttagatttttagattttaggattgtgaaatatgaatttttgttgttttaagttatttattttatggtattttgttgtggtagtttgagtaggttaatagattatttgagtattttataattttacgggattttttgtagaagagtaaaaatgtaagaataaagggttagtatttatttattgcgggttagggtcgggtttttttttttttttttttttttttttttttgagatagagttttatttttgttgtttaggttggagtataatggtaagattttagtttattgtaatttttattttttgggtttaagcgatttttttgttttagttttttcgagtagttgagattataggaatgagttattatgttcggttaattttgtatttttagtagagacggggtttttttatgttggttaggttggttttgaatttttgattataggtgattcgttcgttttggttttttaaagtgttgggattataggtatgagttattgcgttcggtttagggttaggttttatagttttttttttattttttttttgttttttttagtttggggacgttatagtaatagtagttgggtatatagtttttgaagttgtaaattttggttttgagagtatttattagagtttttaataagtggtggttagtaggttttgcgtgtttggtttagaggagtgggtagatacggaagtttagatagtttttgtttcggattgttatttttattattttttgtgattattttattagggtttttggtattcggaggttattttttttgttgattttttatattttgtttgtttttttaggttttatattttttgttttttttttagtagtttttttgaggttttattttaggtttttttttgttggggaggtacgcgtttatttttttatttttagtacgtttatgattgtttatttgtttatgagtgttaatgtttgttttgtttatatttttttttgagttttgacgtgtttttggttatttttatttggataatttgtgggttttcgagtttgttatttttttcggttttaatttttttttggggtttttagtttagtttatagtaattatttataggtggttttattgtaatatttttttttagttattttgtttttatttttatattttatttattattaagagtttgttatttttattttggataattttttttttttttttttttttttttgtatttttttgttgtagttttattattatttttcgggtagagttgggtttttttgttaatttttttgttttttgttttttatttttatttagtttagtttggaatttttttttatatatttttggttaggttaattttaatttttattcgttattggttttaggttatagtttgtttttttatttagattggttggggttatttcgggtttttttagttgttatatttattatatatacgtttagttgttatgatattttttattgtattttttatgaaagtaggaatggtgtttgattttttagtattttaggatagtgttgggtttatgggagtaagggaaagagggaattaatgaataaatgaatgtatgtgtggaaaattttattagggtattataggaggttagtataagtttttggttatttttattattgttttgggaaattttacgattttagtttttagattttttaattataatgtaggtagattagtgttttttttttaaatattaaaattatttaaattaaatatgagtgttatttgtggatatcgttttagtttgtgtgcgatcgtgatgtagagtcgatagatttttgtgtgagaaatgttttttaggtagatggtttgagtttaggagttttaaattagtttgggttatatagtgaaatttcgtttttattaaataaatataaaaatttagttagttgtggtggtgtaggtttgtgtttttagttttttgagaggttgacgtgggaaaagggtttgattttgggaggttgacgttgtagtgagtcgtgattatattattgtattttagtttgggagatagagtgaggttttatttcgaataaaaaaagagaaatgttttttttttagagaggtttttttaattagtttaattataattttattttttttttttttcgatcgaggtatttataattttttaattttatttttttttgtaatttattaggttataataggttttttttcgttattataagaaatttttttatttttagatttttgttgggattagtttttttggtttttttttatttttttttaaggttaggtttattttttttttagaatatttttagaatttttttttaggtattaaattttcggttattttaaaaatgattgaatttggcgtgtttagtgtttagtatcgcgttaggaatttggaaggagttttattagtatgttttggataataatagggttagtatggatttggaaagaagatggggagggaggaacggtgggggaaggatagatgtatggttacggttaattttaattttaggtgttttttttagattttaatttggggtagatagtagtcgtataattgacgttaaatgttaatgttagaaagtaggtacgaggagatcgagtagttttgggaaagttttaatagaaatagaaatttaggattcgcgttgagtttaaggtagtgattatcgtttttgtttgtcgtttagtttttttttgttgtagaaaatggttttttattttttaaaagtgtgattaagaattggggataggatatggggagaaggggtggtggggagattttataggcgtagtattatagtaggcgatttatgatagaaggatttttattttttattattagtttttatacgtttttttaaaatttttgatatgttaatgtttaattttgggtggtttttttggtaggtattttattttttttttaaatttgtttgagttgttattttttttagagtagcgaatttagagggataggaaggttatttaaaagtgaggattatgaaaatatatttaggtttttcgtggtttttaaaggaaagaatttacgttatgaggatgtttgcgttatttttattaggtagtttacggttttttcggtttgattcgttttttcgttgttttttagtagtagaaataggggtgtttttttttggggattttggttatatagtatttttttaatttttaagattttgacgaaatgttagtttttagagaagtttttttgatttatttatttataattatattatttggagtttataatttttgtgtttcgaggttatttgttttatagtatttattatttttgaagttttatagaattgagtgagtatggaatttgtttgacgtttagaagttttagaagggaagagatggttttttattgatatgtttattatatttagaatagttttcgtatataggcggcgtttaatgagtattttttgaatgaatgaatttacgtgtagttggaagaagaagaatttattaattattttagaatttgttatgggttaagtcgtgtttttttttaaaattttagttttaatgtgattgtatagttgattttttatgggttttaattttagattagaaatgttggggaaaataatttataaagttttaataggtaaaatttgaatttgtcgtatgttaagtgttaagttgaatttacgtgaatgaagtgatgtgtaggtattgtattaggtattttaagtaaggtggggatgatttaaaatatataggaggatatgtataggatatatgtaaatatgatattatttgttattaagaatttgagtatttttggattttggtattagaaggagattttgtttagtattttgggaggtagaggtaggtagattatttgaggttgggagttcgagattagtttggttaatatggtaaaatttcgtttttattaaaaatataaaaattagttaggcgtggtggcgtatgtttgtaattttagttatttgggaggttgaggtataataattatttgaatttgggaggtagaggttgcggtgagtcgagatcgcgttattgtattttagtttgagtgatggagtgagatttagttttaaaaaaaaaaaaaaaaggatattttgaaattaatttttgtagatatagaaagatggttgtatttggaaatagggtttttaaatagggaaataaggttaaatgaggatatgagggtgatgttttaatttaataggattggtgttttgatacgaagagagagatattagggatgagaatatagaggatgtttgtgcgaagatatagtgggagggtagtttttagttagttaaggagaggaggttttaggagaaattaaatttattgattttttgattttaggtttttagtttgtagaatttagataatattaatgtttgttgttgaaggttttttaggtttgtgttatttattgtattagttttagtaaattaaagtagaatttttatgaaatttttatgatggttattagtaataatagaatggtttgttttgtaaattttattataaaaatttaaatttggttgatagtattggaggaaatgatttgggtagggtgggtaaagggaaagtttttagagtaatgaaggaaatgataagggtttgagggttttcggttttcggttttagtttaagtttgaatttcgtataaaagggttgaaaattgtggtgattagtatgatttagtggggagttttgaaaataaattggttttacgttattttttaaagaaacgatgtgggtaaatgtattcgagtggaacgtgtttttgtgtggataatatttatttaatagaaagtagaaaatagtttttgttggttttataattaattttagtgttgtttcgatttgtagagaaacgatgttagatagtaaatatatatatttttgttttttataggggtttattaattgttgttatttatgtagtagggtttaattgtttttgatttttggttttttattggttatttttttgttgttgagttaaaattcgtttttttgttgagggaaaaagtttttttttttagtttaaataataaagtttattaggattgattttggcgatgttaatagaattaggtgttgggtaaaggtaaaaagtaagattaaggaaaaaataatggtagtttttaacgtagggttgggaaatttttttacgtttatttaggggagtttttaagttattttttcggggattttttgcgtttgggttttagttttaatttagtaagtagattattttggaaacgtattttgttggtgagagattagaaattggtttttgtaagagaggaatgtaaaacggagaatattgagatagtaaggtagaattgttgggttgtatagataacggtggggtttgtgtaattgttggaatttttattagaaggttgttatttagttaaaatatgtgttttttttttgtttaagatgtatttattatttataaggataaaattaatttttagttttttcggagtgttgtttatttatagtgtataaaattcgggaattttaaggggagatgagtattgttaaaataggtaatgttagtattttgtttttttggtttggaaaagtgttaaaagggtttagtttataagttttttgagatcgtgtgtgatttattttggtatgttttaaaatatttaatttttgaaatataattgataaatatattggtaaaaaaaattttgaatatttaatggttttaaatttttagatatttttattttttagtagttttgtttgtttttagttttttttaattttgttttatttttaattatttagagtgtaatttcgtaataatagagaggaagttttaaatgatataatttaaaagtaaatagatttacgggatttaaaaaataatgggttggttatgtataattatttttcgttagttatgacggggaatttgttgagaattttagttggatatttcgacgtggtgggtagtttgtattttattttttttttttgttttttaaaagttatatatttataatcgttttttttcgttgaggtttgttttttttttatttgttgttcgatcggtttattttttttttttttgttttttttttacgatggattgttaagtttttttcgaaaggtttttttttggttattattttgttttggttagtttttttataggtttttagtatttttttattttttcggtttttagtatttttacgcgttgaggttttatagttttttttttaaagatagttacggttatcgtttaaataaagtttagatttttcgatgagaagttgaaagttttttatgatttgttgttagtaggtttttatttttatttatatttttttttttatttttttttttttggaataaagtttattttgattagtttatattttattaatttttgtttagtttaattgtttatggttaaataaaatttttattttttaaatgtttttatataatagttatagtgagatatatattttttaagtttttgtttatttaaaaaaaatttttttattgcggtaaaaatatttaaataaaagttattgtttttattatttttttttttttttgagatggagattcgttttgttatttaggttggagttgtagtggcgcgattttagtttattgtaattttcgtttttcgggtttaagtgatttttttattttagtttttttagtagttgggattataggtgtttattattacgtttggttaatttttgtatttttagtagagataaggtttttttatgttggttaggttggttttaaatttttgattttaagtgattcgtttgtttcggttttttagagtgttgggattataggtgtgagttagtacgttcggtttatttttattatttttaagtgtatagattagaggtgtgaaatatgtttacgtggttgtgatttttttttattttttatattttttaggtatgtttcgtgttggttttttgttttttatatgtttaatttattaatggtttttatttgggtattattatttttggtttagagggaataatcggtatttttgagtaattttagaatggtataagagaatttataggagatattttcgttttagttatatgtttagtgttatttaattaagatttgtaagttatataagttatgttatattttttagtagttatagtacgtaaaaggatataggtgaaattaattaatattttattttttataattttatttatttaaaatattattattttagtatgtgattaatattttgaaatttttaaggagatattttgtattttttttttatattatgacgttttgagatttggtgtgtgttttataattggagtatattttagttcggataaagtatattttttttgtttgtttgtttttgagatggagttttatttttgttgtttaggttggagtgtaatgacgagattttagtttattttaatttttgttttttaagaaagaaatttttttgttttagttttttaagtagttgggattataggtgtttgttattatattaggttaatttttttatttttagtagagtcggagttttattatgttggttaggttggtttcgaatttttgattttaggtgatttatttattttggttttttaaagtgttgggattataggtgtgagttattatatcgggttagattaggtatattttaagtgtttaatagttatatgtggtgagaggtaattgtaagggatagggaagttttggttgtttggttttgggtaaattatatattttttgagtttacggattagttgattgtttgtttgagatttagtatttaaaatataaagtttgggttaggtgtagtggtttatatttgtaattttagtattttaggaggttgaggtaggcggatcgtttgagtttaggagtttaagattagtttgggtaatatggtgaagttttatttttataaaaaatataaatattagttatttatgatggtatatatttgtggttttagttatttgggaggttgaggtaggagtttgagttcgggaggtagaggttgtagtgagttgagatcgtgttattgtattttagtttgggcgatagagcgagatttttttttaaaaataattaaataaataataacggtaattataaaatttggagaatgaaggaaggaagaaatgttttgtttttttatttgtaaagtgtatatgagattattagttatttatatttgtaatgagaattaaattatgttttttggaatttagttgaggttagagttttagtattgagaaattttaggtaaaaaatttaatttcggtatgttttcgattatttattagtaagtcggggataataatggtggttaaggtaaataatggaaagtgtttgtatatagtgattatttattaattgtagttaaaattgagttaataataataataatatagtggaattaagatatagttaatagatgtagatgatgttaaggggaaatattaaagtaagttagtgtatggtaggggtagtagtgtaaaaatttaggggagggagagatatagtagttttaggaaaaaaaaaaattaaaataatagtcgtatattaaattgaatataggaatttttattatagttttttttagttttaggttcgttagtgatttatttataggaggtttttaataaatttttgtagatggtttttttatgttatgagaatacgaggtttttttttttttttattaaattatatattaaatatcggggttagtttttatgtttgtgtttatgagaaagggaaaagtaggttttttttttattttgttttgatttatttatgtgcgtttatggtgttcgtttgtataaagtagaatttgtgtttttgtaatgattttataaatttttttggtttttttgtattggttgggaataatgaatgttttgtttttattgatagtagataatggtttttaggaagggttaggaatttataagtagataatagggagtttagtgggaggtgggcgtaggtttgtatatacgtgtgtatatggtgggaagaacgatatggagattataagatgtcggttttgattttttttttttttttaatatattttgtttttttaattattttaattattattttttagtgtgtttgtttgttagggttgttataataaagtattatcgattgtgtggtttattgttttataattttgaaaggatataagtttgagattaaggtgtgagtaggattggttacgtttggagttttttttttaggtttgtaggtggttttaaaaagtaataggtgaaattaattaataatttattttttattattttatttattatttttttgtgtttttatgcggttttttttatgtgttcgtgtttaaattttttttttttataaagatattaattagattggatcgaggtttatttataggattttattttaatttaattattttttttttttttttttagatatagttttattttgttgtttaggttggagtgtagtggtgtaattttggtttattgtaatttttgtttttcgggtttaagtaatttttttattttagtttttcgagtagttgggattataggtgtgtattatcgtgttggttattatttttagtatagatagggtttgaggttaggttggttttaaatttttgattttaggtgattcgtttattttggttttttaaagtgttaggattataggtatgagttattatatttcgtttaattatttgtttaaagattatttttaaatcgaattatattttatggtattaggagttaaggttttaatatgtgaatttgggggtgggatataatttagtttataatattagtaaaatttattacgaattttagaattaaggaaaaaagaaatagatttaaaatacggaagatttacggaaatttcggagaggaagtaatatgatttaaggaaacgttaataattttaagatatttttaagtaaatttgatattttgagttttttttttttttgttatatgtttttttagtttatgattttttaaatacgattttaagttattaatttttttgtaaataagtttatcgttggtatttttggagatatttttattttttgtttatttttgtaaaaagaggttattatttttttatttgtattagttattttggatttttatttttttagttgtttttagtgaggtataaagtttaggaaatattagataaatgtagtttttattttttattatttgtttaattatttaaagtttagtaatatgtaaatagagatagaaggggttcgaagagtagatttaaaaagattttttgaagtaaaatatatgttaaaattttttgggattttaatatttgaatataaaaggttaattttttgtggtgaatagttatgatttgtatattagatggagaatcgagattaattgtttagtttataggaaaaggggaatttaaaatatttttatgaagaggtatttaaatttttgtagtaattgtaattattggatgagaaatttatagttattagtaagtgggttatttttttagttgattttgtttagtttttttaaatagtattacgattgaagagtaatattatttaaattagttattagaaaataaaaagaagaaattaatgatttttaattaatattgttgattttattagatataatttgaggacgttttagaaaaattaatttaaaatattttttttattttttttaaaattttttgggttttattttgtgaatatgtagaaatagtatagtttttttgaaattgtgattattgaaggaataattgggggttttatttttgttttcgttaacggaggggtaaattttatttaatagaggtttggggatttgtttagagttatatagataattttaagattgaaatataaatatttttgttttatttaggatattaatttttaaaatttttttaaaatatagattttttatttattatttagttaatcgtttagttgtaaaggtaattttttttttggtaagagtaaattaatttgtgtggttaagaatgaaaattatttttaattttatagtatttttagtatttagcgaatattttttattattttaatgattaaaaagtaattaatgaaataatatgaaatatatatacgtagtattatgaatatttatatagttaagtttaataaaagaattatttttagagagtagaatattatcgattttaaagggatgttttttatttataagaattaattattatgaaaatatattttaaattttgagatattttttttgatttgtggtggaggggtagttgtgattggagttattatttttagtttatgattttttattttattgggttttatgttttgaatttgggttaagtataagttatttattgtttttattaatattaatggagttttgttatgttaaaattatgttagaaagagtttaatgtggtttttatcgaattaagatttattggttgtaaattttatttttttttcgtatcgagaaaaaaaaagtaaaattagatattttgattatgattatatttttaaaagtggattagtagtgttaattttattatattaaatatattttattattatataaagaaaagattaatagtgtgagagtttataattaagtagtatatagggcggatttttatggtttagaaaattaataaataaatgtaggtaattgtttgattaatttaagtttagtaaatattttaatggttgggagatttatttagtggtttaaattaattagtttagttgttaataagtatgtaattgatgagttttttggataatcgttatttttttgtaaattttatggtgtgaaaataaaaaggtttatgtgtggattatagtatgaagttatataaatttttaattgggattagttttattgaataagtatttgattagtaagattttacgaaatattatatatgttttatgtaatttttataagttttacgaggaagaagatttttttttttggagatagagttttgtttttgttgtttaggttggagtgtaatggtacgattttggtttatcgtaattttcgttttttaggtttaagtgatttttttgttttagttttttgagtagttgggattttaggtatgcgttattacgtttggttaattttgtatgtttagtagagatggggtttttttatgttggttaggttgttttcgaatttttaattttaggtgatttatttgttttggttttttaaagtgttgggattataggtgtgagttatcgcgttcggtcgtggttaatttttttaatttgtgtgaattaaaagttttttttttgtaaaaaggggaaataatggtatattttttttcgtagggtttgtgggagttatatgaagtatgtatagtgttttgtagggttttgtttattaagtgtttatttaatgaaattagttttagttggaggtttatatggttttatgattgtggtttatatttatgtttttttatagaggggaaatttgtttatagtttgtttagttgggatatggttaggtatggatgtgatttttaatcgatagttaagtagttttttgttatttagaggggtggtatgatttggttgaggtttgagttgggttttaaataatttagtgggttatttgattattgtgaatatttaaattaggtagtagtttaatgtgattaaagaaaaataaaaatattttattttttaaatttgttattttaaaagtataatttttatatttttatattatggatattttcgtaagataatttatgtttttttggtatatagaagtagttttattatatttgagtattatagtttagtttgtagagggagaaatagtataggtgagaaatagaataggtgagttataagtttaaatattagttaaatatagatgtgattggttttgggtttttaattttgagattttaaagttttttttgaggcggtttgttaatttttgtggtttgttaagtagaggtgatataggttgtttgtttagtttaagtttattatttttgttattaagttaaggtttttatattagagaatttttggtaatgtattaaaagttaggtgtataaatcgggagttgtttttttagggtttagagggggatagtataggtgaagatggttatatttttttatttattattgagggtgtatttttattttttgtaaattttagtgattaattaagttatttagtagatatattttagattttatagaagaatttaagttgagaatttgttatgtgtttgttatgtgttttttaataaattttatgttgaagttttaatttttagtagtttagaaggtgattttgtttggaaattaggttattgtagatgtaattaattaagacgatattatttgtgtgtattttaatttaatatgattggcgtttttataaaaaggagaaatttggatatagagatatatagagaatgttatgggaaggttggagtcgtgttgttagtagttacggaagtgttagaagttgggagaggggtttggaagagatttttttttaaagtttttagagggtgtaatttgattttgaatttttagttttttttgggttatcgtgagatagttttcgttgttttaaggtttgtggatattttgttatggtagttttaggaaacgaatgtagtatttaagggttataggtatttgatttatattgaaattattttgggaaattttttttaattatttcgtgtttagtttattagaaagttaaataataaatacgataaatttaaggttgattttggataaaggtttatttttagagtattgattaatttaggtattattgtacgcgtagggttttgtagtagagtgttgttgttaagagagttagattcgaagaggagatttttggattatgataaaattttagaattgtagttagagtttttatatggagatttgtattttatcgagtttgttaaagtatttattattcgtgaaaaattatgacgagtatagtagagtttgtgtgtgtgtgtgtgtgtgtgtgtgtgtgtgttttagtaattaagatttggttttagtttaaataattttgtaatttgggaggtagttattatacgtttgtttgtgtttaagatgttgtatggagtaagagaggtgatatggagatagaataaagagcggggagaaattatttttagttgggtagaggagggtaggttttaggaagaattaacgtggtattttagtggggttggaaggagttaggagggtgggtttggagagtttgtggatttattagagtttatttttaggtaattaggatggattatgttgcgaggaataggggatggggagaatgaacgaggattaaattagattgtgttaaagggatttagtaggagataaaaattaaaaagtagttagaggttgggagtagtggtttatgtttgtaattttagtattttgggagtttaaggagggtggattatttgaggttaggagtttaagattaatttggttaatatggtgaaatttcgtttttatttaaaaagaaattagttaggtatggtgataggtatttgtaattttagttacgtgggaggttgaggtaggagaattgtttgaatttgggaggtagaggttgtagtgagttaagaacgtattattgaattttagtttgggtgataagagtgaaattttgtttaaaaaaaaaaaatatatagtagttagaggtgtaatttataggagttgaataatttaaaagggattgagaagatggaggaattaagatggtgttgagtaggagtagtagggaatgaagaagaggtagattggttagtggtaaaggtaacgagtttggtttagaatatattataggttaaattgggttttttataaagatatattgaagttttaattattagtattttagaatgtgattttatttgaagatggggttattgtagatgtaattagttaagataagattatagtggagtaggatgggtttttaattttatagagttgatgtttttataataagaggaaatatagatatatatatatagtaaaggttacgcgaatttgtaggtagagattggagtgaggtatttataagttaaagtaggttaaagattgtaggtaattattagagttaggaagaaaagaagattttttttttttatagtatttagggagagtatggttttgttaacgttttgattttatatttttggtttttagaattgtgagataataaatttttgttgtttgatattatttagtttatggtattttgttatggtagtttaggaaattaatagagaacgttaaaagggaagatttaagtaaaattagtgtagtaggaagtcgttgttagtttcgatttgttaaattattttttttatggtattaagtgtagaatgagtttttttttttttatatttataaatttatcgagaataagggaagagggtgggaatttaagagtagtttattattatttagtttttacgataatatatattataagtgtttgtaacgttaaattataaaagagaataagtttatagatggtattttttaagaggagtttaataaattatttaggtatattgatcggatgttttgtggatattaaaagttttgtttttatattagttttttagtattagtagatattgtttttttttttaaattttttaaatttattttaagtagagttggtttgatattaattattttttttttttatatttttagaagtttggattttatttttgttttgttttattttattttataataaagtttaatgtagggtttttttataggggtgattaaaagacgggagagttttttagggtcgagaagaaaagtgagttgaaaaaggtatatttagtttatttatttttgttttaataaaaaatttacggtcgggcgtggtggtttatgtttgtaattttagtattttgggaagtcgaggtgggtagattatttgacgttaggagtttgagattagtttggttaatatggtgaaattttgtttttattaaaaatataaaaaattagttaggtatggtggcggatgtttatagttttagttattcgggaggttgaggtaagagaattatttgaaattgggaggcggaggttgtagtgagtcgagatcgcgttattgtattttagtttgggtaataagagcgaaattacgttttaaaaataaattaaataaatatttataaagtataaagtttgttttaatggtaattataaaatataaaatggttttgtttaggtggggttttattatagagtatatggattaaaaaataagattgagaaatattgttttgtgtgatttatttttcggtttttttttggaagttagattagcggggggttttgtattttaagtttgtttttagagtttaaggttttttttaatagaatgttagtataattgtcgtatttttgtaatgtatttttattttacgtagtttttttttttttttttttaagagaattgttaatgaattataagtttaagtgtatttaataatgatgagtattttagggtagggaggaggtgagtatttcggaaagatagaatatggtggaatagaggtaatgaagttatttagaaggtttaggtagtattttttatttaaagtttaagaaatattaatgtttagggtagtttattttttagttttgattattttattttttttattgtttttttggtttttgtttgttttttgttttttgtttttagggtttaaagatttttttgcggttaatgagatgggataagaaaaataataatatggtgttatgagttaattttgttttcgtaaaagatgttggagttttaatttttagtatttgtgaatgtggttttatttggaaatagagtttttgtagatgatttagttaagatgaggttattatggtgggttttaatttaatatgattgtgtttttattaaatggaaaatttgaataagaggtagatatgtatagagggaagatgatgtgaagatagagggaggatgttttttaagttaggaatgtttggggttattagaggttggaagataggtttggaaagagtttttttttgtagttttcggagggaattaatttattttgattttagatttttggtttttagaatgagataataaatttttattgttgaagttatatagttttttgttgttgttgttaattttttttgttttggtttttttgagatagggttttgttttgttaatttagttggagtgagtggtgtgatttcggtttatcgtagtttttattttttaggtttaagcgatttttttattttagttttttaaaagtagttgggattataggttttcgttattatttttgggtaatttttgtatttttgtagatatagggtttttttatgttgtttaggtttgttttaaatttttgagtttaagtaatttatttgttttggttttttaaagtgttgggattataggtgtgagttatcgcgtttggttttaagttatatagtttatagtattttgttatggtagttataggtaattaatttatatgatattatgttattagtaataatattttttagttgattattttaagagtgtttttaaagagtgaatattttaagagttatagagaataattttttgggtttatataaattatacgtaaagtaattataagttatgtgttaatattttataaataatataaagagttttatggattattttaataattttatatatttatatgtgtttatgaagaaattttaatagtaattttaaatattttttttttttgacggtgttttgtagaaatatgttagggaaattaagaaattattagagggataatatttttttgtttttgtttgtttgtttgttttttttttgatttaatatggaatgagatagtatataatattatataagttaggaatttagtgaatattattgatttttttatttaaggaggagattgtttttaggtatcgtggtatttgtatagaatgtgatttgttatagaatagagtttagtgaggtaagaagtaagagagagaaattttaggtttttttttagaggaaaaagttattgaagaggaggattttattagaaagtggtttcgtgaattaggtgaagtttttcggtatgatttttgaagtcgattttagtttttgggatatttagtaaatggaggtgtatgaagagtgtattagttggttcgggttgttaaaataaaggattatagattgggtagttttaataatagaattgtatttttttatagttttggaggtttaaagtttgagattaaagtgttagtagggttgtttttttttgaggtttttttttttggcgtgtgaatggttatttttttattgtggttttcgtgtagtttttttttgtgtgtgcgtatatttgtgtttaaattttttttttttttaggtatattagttatattggattaaggtttatttagataattttatttcgttttagttatttttttatgattttatttttaaatgtagttattttttgagatattgggggttaggattttaatatatgaatttgtggttgggggttataatttagtttatagtaaatattttgatagatataagatttgttaggtttaaggtaatgtttttttttatattgattttttattaggggtgattaggatgataagagtttagtaattattgtgaaatatatagtagtttattggtttttttagatgtagaagttatattgagtaattttattttaaaggttgtttaagtttgggtattagtgaggtatggtttatttagttgtttgtgataaattagaagttatttttttaatgttgaaatttttttttgttatatagagatggatgggttttttttattatatatagagaaagttaaaattattacgtattatttttagaaaagaaaaatttttgttttaaggttggttttttattttttttatttgtatgtaattgttataggttcgttattaaattgttatattatttttttatttaagaaaggaatcgggttgataagtaattaatattggggagaattttttttttcgaatttgtagattggagtttttgagattttagtttaatagttgttttagtttttaatatataggaagtttgagagttttgggtttttgaagtaggttgaatgatgatttaggagatataaagtttataggtttcgtgaagggtatttttttaagattttaattgttatatatgttagagtatgttttgtgttttttgggttttgagtgatataaatatattgaatttatttattatttaaattttttattttgttttttttttttttatagaataagtaacgaagtagattttgttaaagaaagagattaggattgattttgtagatttttatttgagattcgttaaaattttgggatatttaattagttattgttggaagaaatatggttttttttattgtaataatatgagtttcgtgtttgtgatttatagtttagttttaattattgggtgtagattagattgttgagtttgttcgcggtgtatttggtgttttagataaaagtatttaatggagggggttatttgggggaagaaatttagattttatttggtttgttaattttgtgttttagagtaaagggtatattttttttcgtaatgttgtttgtttgttaaattatgtattttgtagttgtatttatttaaataggaagtttttgtttaattgggttgtttagaggggatattttttttaattggtttatttgaggaagtgtttttttttaattggtttatttagaggggatgtttttttttaattggtttggtaaggtatagtttttttaatgtgtataaaagtttatataggttattagtagttttgtataaaaagggttattattaagtgtttgaatgataaaataaatgattatttttaagtaaaggtaacgtttgttttattttttaagttagttataattgggaaatttttttagtagtgagtattttgatattatagtatatttggtaaatggtttgagatgtagaattttgagtttaaaaatggattttacgaaaatggaaagagtattttatgagtgtagagggaatgatttggaagagggagaagttattagttattttttttttttttttttttttttttttttttttttttttaggttttgggatgattttcgtttttataataaagaggttttagatgtgtttttttttaaatttgatatttaatattttaaattttaaaattagttttaatttaagaagtatttttgttttataggtaataggaagtaattaatattttatttttatattagaggataattggtagttaaaagtagttgaaaaggtataagaataacgtagtttcggggaagaagggagaaattataggaattggaaatttagagattttggtaataagaatttaagataaaatttttaatttagtttcggaagttaaagaggttttcgatgtatattggaaatgatagaatttttagtaaagggttagtgaaaaaaatgtattaagttatttttataattataaatatgggagaaagtataatttttaaaggtagtaatatgtttttttgagtgttgaggtaggtgttgtttatttgattaaaaatatggagaattaattgttttataaatttttttaaattatattaatttggtaattcgtgtagaattatttataaatagtattttttattttattgtgaaaaggattttttgttgttaaaggacgtttagtggtaaaaaggtgataaggaggtgaggttagtaaggattttagtattatatttttattacgatgttattaattttagaaatataagataatttagtaatatttatgttggggtttaagatatattaattatttcgaaatatgattataggagattagaatatgatattttaattagagttttttggtatagtttgagttgtttattttgagaaattgtaaataaagaagtagtttcgaaaagttgtttttttgtaaataatatttataaagaaaatttatgtatcgggaaaagagttgttttaggtaattttttattatttggaagatttttatttgtataataagataagttttatttattatcgtatattttttttttttatttttttagaacggattgttattatttttaaagttttaagtttttatttttttttgtagttcgggttgttgtagaagtttttatgatttggttttttttggagttttatattttgtgggatttttatgtatacgatgtttttaaatgtggttttttttttgttattttgttttatgtcgatttaatttgtagtttaattaaataagtagacgggtggagggaagatattttttttttttttatatttagaaagagtaaaaagtgaaatataggaggaggtagagaagttaggaatagtgagaagttttgaggtagggggtagggtgaatggtaggatgcgtttaaggaattatagaagttgttaagaaagggaggtttgcggtagaggtgggtaagaggaaagtggaattttaggaatgtagatatttagagaggtatcgcggtttttagggaggtgttgacggaagaggcgtttttattatttttttttttatttttttttatttttaaaataaaatgtcgttatttatgataaattgagtgggtatttgttttttattatttaaaagattataaataatatatatttttaaggcggaaatataattatgaaagtttaaatgaagagaataattaattattattttttttttttttttttttttttttttttttttttttttttagagagagtttggtttttttgtttaggttaaagagtagtggcgtaatttcggtttattgtaattttcgttttttgggtttaagtgatttttttgttttagttttttaagtagttgggattataggtatgcgttattaggtttggttaattttttggtatttttttatagaggtagaggttttattatgttggttaagttggttttgaatttttgattttaggtgatttgtttatttcggttttttaaagtgttgggattataggtgtgagttattacgtttggttattttttttttgattaatataataatgattgtatttttaggttacgtgttgtatatatatatatatatatatattttttttttttttttttttttttttttttatatatatatatatatatttttttttttttttaattaaatttttattgaatattatgaggtatttttgttattattttgtagatatagaagttgaagtttagagtttttgaatattgtgtttaagattatatagatattaagtagtagaaagtagataggagttttaagttgttagtttttatagtttgtgttttagtatataatattaataggttaaattattatgtaacggattagaatatatagttaaatatttttatttaatgtaaagatttttttgtagataattatgaaatattggatttattgattatttataagataaaattaataataagttttttagtttatttatgtataaaagtaataagagaaaattaaagataaaagattattggattggttagataaaatataaaatttttatgtgtttttgttttttttttaaaataaaagtattataagatgaattaaaaggtaaatgattatttgggagataatattcgtaatataataaagtgttaaataaagtttagttaaagatgtttttttatatattttaagtttagtttaatggtttttttgtatatagtgaattgtaattttatttgtatgtgtaaataggattttaataggatgtgtaaatagatgtgtaataatatatttaatagtattattaaatgtaatttgtttttgtattagttagagtttgggttaattacgggtgtgttcgtatgtttaaataaggtaaatgttaagttataagtaatttagttgttttttttttttttgtttgtttgtttgagatatagttttattttgtcgtttaggttggagtgtagtggcgtaatttttatttattgtaattttcgttttttgggtttaagttatttttgtgttttagttatttaagtagttgggattgtaggggtgggttattacgtttagttaatttttgtatttttagtagagatagggttttgttatattggttaggttggttttaaatttttgattttaagtgatttatttatttcggttttttaaagtgttgggattataggtatgagttattatatttagtttgtttttgtattttatttttattttgtttggttgggggttagggttggggggtgttcggtttttaaattattttttgttaattaaatcgttaaatttaatttgtttaaagtttttttttttttaaataaaagattaaaaagttaatatttgtaatttgaaaagagtttttataaattaataagataaataggagaaagataggggaaaattattagtaatagtttataaaagaagaaatatatttttaattaagtatataaattatgattagtttaattattaaaatgtttagttaaaaagttatttttatatttgttgtgttatttggtataatttttttgaagtgtaatgtggtaatatgttaaaagttttttaagtatttatgttaaggaatgatttagagatgaatatataaggatagtaatagtagtattatgtatttagggaaaattttgtaataattttaatgtttaataattgggaattggatttaaaaattatagtaattttaaataatggaatgttatgtattattaaaaattaaattttaaaagaatatttatcggttaggcgcggtggtttatgtttgtaattttagtattttgggaggttaaggtagagtggattatttgaggttaggagttcgagattagtttgattaatatggtgaaatttcgtttttattaaaaatataaaaattagttgggtacggaggtgggtgtttgtaatattagttatttggaagtttgatgtaggagaatcgtttgaattcgggagatagaggttgtagcgagtcgagattgtgtcgttgtattttagtttgagtaatagagcgagattttgttttaaaaaaaaaaaaggtatttaaaatagagagaatggataatgtaatgtgattagtatagtaataagtggtaaagttgataataaaaaagtatgtataagtggttatgatttagatggtaattattaaatatgagtttaagattttttttgatttgttaaaaattttaattattttggaatatatttgtgatttaattgatttaaagaattttaaaatttttaatgtttggttaaaaatatttaaaaatatattatttttaaaatatttatagttgattatagaaaaaatattgatttatattagattttttaaaaataaatgtattgttgagtaatatgtttttttgaaatttggaggatataattttaagtttgaatattggaaagaaattatttgttatttcgtatatttttaggtatttttttagttgttttaatggtttttatgataaaaagtttatttttgattttggaaaaagtattttagagtaataaattaggtgggagtaaaatagttatttagtattttttttttagagagaaatttaagttttattatgttaaattggttttgaaattgtaattattttttataaatgttagtttttaatagaataaaatgttattttatgggaatgatattatgaaaatttggagatgtgtttttaaaataagttttttttattagtattattaaatgtaaatgtttaattgagaattgagttatcgattagtttttttaattaaatttttaatttggaaataagaatgtattgagaaagttatattagagtagtagtaattttaattaaaaattagattatataagtgataatatttatttttatttatttggttttattaaagtagggtttagataaaatgttaaaatattttgattttagattttatagttaattttttttaagttttttttttatttgaggtatttttttattttatttgttttttatgtttttttttagtttaatcggggattaagtaatggtttgggaaagttggtttgtttttaaatcgttagtataataaggtaaaagtattgggtattttgttttgtttttaataagtaatttgtgtttattttcgtaggaggatggtttaacgaggagattggaagggattgtttattgtgtgacgtaagaatgtatttttagttttacgatgtgatttaaaaattttttttttttttagtagattttttagtttttagcgtaaaagagaagtattattagagttagattgatgcgaattagagttatttagagagttattagtttttattgttttttttattgaggaagtttgttaataaaaacgtgtatgtatttagtatagtattatataatttatatttaatgttatatataatatatatatatatttgtgtatatgtatttatatatatatatatatatatatttgtgtgtgtatatataattttttttttttttgtatttttttgtttgtttgtttttgtttttgttttgagatggagttttatttttgttgtttaggttggagtataatggtataattttggtttattataattttcgttttttgggtttaagcgatttttttgttttagtttttcgagtggttgggattataggtatgcgttattatgtacgtttggttaattttgtatttttagtagaaatagggttttattatgttggttagtttggttttaaattttcgattttaagtgatttgttcgtttcggttttttaaagtgttgggaatataggcgtgagtattgcgtttagtttaatatatatattattaatagtttaagttttttattttatgtgaatttataaagatggtagatttgtattatatatgtgagaaaagtattttttagtttttgggagtatatagggatattattattattaataaaagtattttagtaacgtttagggttttgggttttatttttttatttatttatgatttgattggttgtttattaatattgttattcggaaatttgtagtttggattttaaatattttgatgaaatatttttttgggtgaatgtggttttggtattatttgaggggtttttttaaatttaagattttttatattaaatttaagagagttttgggtaaattaagattttggttattttaatttgtaaaattaggataatagtatttattataaaaggttattatgaagagtaagttgttttatgtagtaaagtatttaagatatggtttagtagatggtacgagatttataaatgtttattattttcgtgattagtatgatttttttatgattaaagtaaaaattatgtatttattttttttttgtaggtttttattgatttggaaggttatgtaattataatttgtttattcgtgttttgttttaggtagataagggaatcgttaagaatttaaattttattttattatttttaaatagagttggcgaggtttttcgaaggcggttataatatttattgtttttttattttttagtattacgttttgtgtttacgggttatttattattgttgtacgtttttaagttgttatatatagagtttcggtaaagagtcgacggtgataaagagaggagcgttatatataagagcgtttgaagaaaggtagaaagatggtttgacgatttattaaaaagttttggggttggatataagataataagaatttaaaaagaggattaaaatggtagtggtgatgtagggagggagtttagaatgaattaaatggtttagaaaatgggtaagagaagtaagtaggattgtaaaatgttttggtaggaatgtggtttaggagattaataaatttataaaaaaattatagttaaagagatagattttaaatttatatatatttttatgggaaatatttaaaataaaatgtatgtttgtaaatagtaattttttttatttgttgtagtgttgttatatttttttaggaaagagagagggttcgttaatattttttgatattgtaaaatattgtttggttttggttagttatttgttatttagatatttaggtgtttaattaaattttcgtagaaagtatagttgtttaggggttaggatttttttatagagtattagttagataatttatttaatatagttattatttagataggtatatttagagtagtaaggaatgagagaaatatatagcgtttgtagaattagagtttgttaatttggatattattttttagaaggttgtttatatgttttgggaagattaaattatgtttggatttatttataaaatattttttggtcgggtacggtggtttatgttatttagtattttgggaggttaaggtaggtggattatttgaggttaggagttcgagattagtttgattagtttgatttcgtttttattaaaaatataaaaattagttgggcgtggtggtgtgtatttgtaattttagttattcgagaggttgaagtaggagaatcgtttgaattcgggaggcggaggttgtagtgagttaagatttagtttgggtaataagagcggaattgttttaaaaaaaaaaaaagtattttttgagtatattttttgtattagaaattatttttggtacggggaatagagtagtggttttttttttatggggtttatattttagtggggagataaatatattaattttaaatatattttatgggattaggtgatgttaaaggtttaattatgtttttttagaatttatttgttggagttttaattttagtattttagtattttatttgaatatgaggggtttttttttttttttttgagatagttttattttgttttttagtttggagtataatggcgtaatttcggttcgttgtaacgttcgttttttagttaggtttatgtgatttttatgttttagtttttcgagtagttggatttataggtgtgtattattatatttagataatttttgtattttttatagagatagggttttattgtgttggttagattggttttaaatttttgattttaggtgatttgtttgttttagttttttaaagagttaagattataggcgtgagttattgcgtttagttttttgaatatgaggtttttagagaagtaattaagttaaagtgaggttattaaggtgggttttgatttaatttgaattggtgtttttattaaaagggaatataggttaagcgtggtggtttacgtttatagtttgtaattttagtattttgggaggttgagacgggtggattacgaggttaggagtttaagattagtttgattaacgtggtgaaatggtttttattaaaaatataaaaattaggtgggtatggtggcgcgtgtttgttattttagttatttaggaggttgaggtaggaaaatcgtttgaatttgggaggtagagattgtagtgagttaagattgtgttattatataatagtttgggtaatagagtaagtttttgtattaaaaaaataaaaaaatataaaagggaatatttggatagagagatagatatacgtggagggtagacgatgtaaagagatataggaagaagatagttatggataagtcgaggataggggtatggaatagatttattttgtataagttttagaaggatttattttgttaatattttgattttggatttttagtttttagaatgagagatagtaaggttttgttattttagttttcgggtttgtggtgttgttttatggtagttttagtaaattattttaggtggtgaggagggataaagtagagtgaaggggtagagagtgataggggatagggtatttagagacggtcgttaggtcgaggttataggaattttaatagtagggttcgtttgtcggttttattaaggttgttttttagagggtattttaaatagatagagtttttcgaagagtgttaaggcgtatgtattgttatatatacgtattaatgtattaatatttgttttagtgtattttatgtttaagttacgtaatggtttttgttttttgaaaggtttttatttttttcgatattttttttttttttttttttttaattattgttttagttagtttgggttggtgtaatatagtattataatattatagattggatgttttataaagaatagataatttggttaggcgcgatgattcgtgtttgtaattttagtattttgggaggttgaggcgggtggattattttaggttaggagttcgagattagtttgattaataaggtaaaattttatttttattaaaaatataaaaattagtcgggtgtggtggtacgtatttgtagttttagttattcgggaggttgagataggagaattatttgatttagaaggtagaggttgtagtgagttaagagggtgttattgtattttagtttggtcgataaagagtgatattttattaaaaaaaagaaaaaaaaaagaagagacgtgttttttttatagttttggaggttgtgaagtttaagtttaatatatttgtagatttagtgtttgatgagggcgtgttttttggtttatagaaatggtatttttttattgagtttttatatggtggaaggataaataagtttttttaggtattttttatttatttattttttttttgagatagagttttgtttttgttatttaggttagagtgtaatgttatgattttggtttattgtaatttttattttttaggtttaagtgatttttttgttttagttttttaagtagttgggattataggtgtttattattacgtttggttaatttttgtatttttagtagagatggggttttattatgttggttaggttggtgttaagtttttgattttaagtgatttatttatttcgtttttttaaagtttgggattataggtgtgagttattatgtttggttttttttatttttttatttttttattgtaattttagttaggtattttttataagggtattaattttatttatgagggtagattttattattttttaaaggttttatttttaaatattattatattggaggtttgaattttaataaaagaattttgggggatataaatattttgattatagtaattatttattataaatggtattattttttttatgaagagatgatgggatatggatttatagttgttttatttaaattagtaagagttaaagatttttaaagattattttatatagtattatgttttttttttgtaatttaggtatggtaagggtcggggtagaattaagggtgtttattttagggttatggttgtagaattaatttgtttagtttgagtgtgtataatttataattgtagtttaattggtatcggtgttaataaattaaggtgatttaaatttttagtttagtaatttgtagatttttatttagttagtagagttaataagggtgggtaataaagtagtggtttttaatattttagaggtaaataattttatttagagtatgacgaaatttatggattttttttttagaaatatgtttatatgtatataattgatagggttttatagatttttaaaatttattaattatttttttttagtttatgaatttttaagaaataatttttgtaaatggtaagaattataaagaaaaagagaaagaataatggggagcgagggaaggtggtagatattgtaaaatatattatttaaagacgattaatttttttaatatataaagagtttttataaattaataagaaaaaggttaaaattttaaaagaaaattggcgaatggatatgaataatgaatagaaatgaagtataaatagttgagaaggtatgaaaatatatttaatttttatgtaaataagagaaataataaataagataagatattatgtttaatatattcgattggtaaagattaaaatgagtattttgttggttgatatgtggaaaagtaaatatttttatattagatgggtgtggttataagttgggaatttttataaattataagggttattaatgtgattataaattgttaatttttatggtaggtaatttggtaatatttattaatagttaaaatagatatattttttggtttaagattaggaatttattttttagatatattgaggggttatatttataaagtgataaatggttatggatatttattgaagtatggtttgagaataataaaaaaaaaaaaattatgtattttttaaatgtttattaataagggatggttaagttaatatgatatttttatataatgattattatgtaataattaattaatataaagagtgaggtaattttgtagtagttatggggaagaatgtttaagatatattgttaagtgaaaaagtaagataatgaatagtatgtatagtttaaaaatatatttgttttggtgggtgggagggatggatgaagagaagttggtttatgggtataaatatatatagatagaagaattaaattttaatgtttgttagggtgattatatttagtagtaatattttgtatattttaaggtaattagaatagaggatttgatataatattaattcgtggaaatgaatatttaggtgatggatacgtcgatattttggtttgattattatatattttatgtatggaatatttatatgtattttataaatatgtaaaatattatgtattaataaagaagaaaaatttgtttttaattacgtatttataaatatgtatgtgggtttttatgtatatagggtatttttggagggatatataaggattagaaggaggagtgattttttacgagaagatttaggaattgaagagtttagataagaagtagttattttttattgtaaatttttttagaatttttgaattttagattatgtgtttgtattattaattttaaaatttaattaaatgtattttgaaaatataaagatgattaaaaattaaaaagaatttagtgattagaagttgtatagttagggtatagtggttatcgtaagagtgttaagaggatgttaatagatggttttattttgagtagttttttttgtttatgagaatgttttaaattgttattttatttattaaaaatttaaatttttataatttttttaataattttttttattatttacgagtgatgggggagggggggtttttttttaggaaagtgttatcgtttttgaagtaggtatgttggtttataatttggtttaatatttagttgttttagagtttttaggaaaaaatttatagagtatatatataaagtgagtttttaattttgtaagtattgagaaatataatagagttttgatgattttaatttaagagaaatgtgaggttagaaaattttttagcgtgtggtatatagaatttgttaatgagatgttacgtcggttgtttttttattgtagggagagagattatagtcgagtagtaaggtagggtaggttgaagagaagttggtttatgggtataaatatatatagatagaaggattaaatgttaatgtttgttacggggattatatttagtagtaataatttgtatatttttttgttgttgttgttgttgttgttgttgttgttgttgttatggagtttttgtttttgttatttaggttggagtgtagtggtataatttcggtttattgtaatttttatttttttggtttaagcgatttttttgttttagtttttcgagtagttgggattataggaatatatatttggttaatttttttgtatttttagtagagatagggttttattatgttggttaggttggttttaaatttttgattttaggtgatttgtttttttcggttttttaaagtgttgggattatacgcgtgagttattacgtttggttatattttgtatattttaaggtaacgagatgagaggatttgatattaatatatggaaatgatgattatttatatttaaaatgcgtatggaaaagatgtttacgttgtttacggtttatatggtatggatttagatgaaaagttttggattttgattttgttttttttagtaaatagtaaatgttgggttgtatttttagatttttcgttagtgttgaagaattgattgttttagttgtaggttattagttgtgagttttttttaggaatcgtttttagtaattgtttcgtacgaggttatgttttttgtttgggtagtttttattaaggattggtcgatgcggaaatataaattttagtttttttaatttaagttggttagttttgaagggttagtttagttttagtatttattacggtatgggtaggggttttggttgagagcggtattggagtttagtttttttttttgtttagtgttgttttgtttttttttttgtagaggttagttttgagagtaatttttaaaagtatatttattttttttttaagattcgtttgttataatttaatattgatagtttaaaaaggtgttggagtttgaattatgtttttttaaaagatatttttaagtttcgttggtatttgtggatatgattttttttgaaaatagggattttgtagatgttatcgagttaaaatgaggtaatattggattagggtagatttatattttatgattggtgtttttataaagagatataggaaaagattaagagatagaagagatatttagagggaggaatattgtgtgaagatagacgtagagatagagcgttgtagttataagttagaaaatgttaaagagtgttggttattatcggaagttagtaagaggtaaggaaggattttttttgtggttgtagagggagtatggttttgttaatattttggttttggattttagtttttagaattgtgatagaataaatttttgttgttgaagttatatagtgtgtggtaatttgttagaattattttagtaaatttatagagaatgttagagagaagatttatttagggtatttttttacgtaattaaggtaggtaagaatattagtaagttggttgttattttttttattagggttgttgtaggtatttaataagaatgtgtacgggaggggtattttgaaaaaaatcgtaaaatattgtagtattgggttggtgttggtgatggaggagagggaatagttgtttcgaatttatagaggtattttttttttcggggattatttagtttttgtgtttttagtttttttttgttggttatcgtattatttagtggtattttttattagaaagcgtgaaatttaatttaggttagtatttagattagggttgagtagagaaagaagttttatttattagttaatataaggtttggggattatttacgggttttaattagttaagagagtaggttttttcgttattataaataatcgatagagggaatatatgttttaaggtaaatgataattttgtgtttaagttttttttttatggagaatattttaatttgttttttttttcgggggtatatggttgttattttttattttttttgggtagataaattttgggatagatgattgtcgcgttgatttttaatagttggtagtatgtagaattttatagttttatagatttgagtcggattggtatgtacgggtagttatagtcgtgatttaatatttgtagagaaaatgtagggttgtattttttttcgtgggtatcgtttttgtattgttgcgttgatttaaagtattttttgaagttcgtgggatttgtattaatgaatattaggaattaggttttacgtgttaatttttattatttataagtattttaaaaagatgaggtagggtaggaagtttaaaagaattcgtttgtaattgtagaatgtaattttcgaaattataggtattgttttgttatatagggtttattaagtaggtgttttgtaaatgttttttttttgttaagaagtttttgttaaggattaataggaatttttagttttttaagtattttttgttttttagagcgattatttttaaatttttagtattttaaaaatataggatttagtatttgtttgttttagaaatatttgttaaaaatagatttgttaaaaggttatttttaaaattagttatattttttgttttgtaaaatatagtaaatcgtatttttagtaatttttttattttaggtatttggtattgttatgttttaagtatgattattggtaatttagtaagtaggtaatttttatttttagtttaaaaatagttttgatggaagtgataagtcggtttattattttttaattaagggttagaataagatattttaatattttaattaattattttatgtatttaattttgtattttagtgagatttaattataaaaaaggtaatagtggtatggattgtttgtttttgttttgtagtttgtttgtttataatattggtttaatatttgagatatatttatttttttttcgatttagtttttttaattatatttttttaatttttattaattttttataaaatataataatttgttatgtgttagagattatgttttttgtaggtattacgaattattattagggtttaagtaatttttatgtgttagttatttaagtagttgggattataggtgtgtattattatatttagttaatttttgtgtttttagtagagatggggtttttttatgttggttaggttggttttaaatttttgattttaaatgatttatttatttcggttttttaaagtgttgggattataggtatgagttatcgcgtttagttattaaattaaatttttaaggaattatttaaatatattgttgatgataaaggattattgttttattgattttttataaatattatttataatgtttgtattagaaatattatacgtggtttttaagttgttttatttaaagtttaacgtttatggaaatttaaaattttaaatttttttttttttttttttttttgagatggagttttattttgttatttaggttggagtgtagtggtataatttaggtttattgtaatttttattttttatatttaagcgatttttttgttgtagtttttaaagtagttgggattataggtatgtattattatatttggttaatttttgtatttttattagagatagggttttattatgttggttaggttgatttagaatttttgattttaagtgatttatttattttggttttttaaagtgttgggattataggtatgagttattacgtttgttttgtttttggattttattttaattttttgtaagttattttttttattttgtcgatagatgatattatttgattatgtagtagtttttaagttattttgtttggttgggggttagggcggggggtatttgttatgtgttagagattacgttttttataggtattataaattaatattaggttttgtaagtataattattttaggtgttttaaagttattattttatattgttgtttaatagttttgtttttcgttttaaagttagagagtggtattttttagaatttggttttgtgattattttttttggtttaattattaattttggttaaagatatttagttttgattgtgaaggtatttattaagagttttatatggttaagtgaattatttatttttaaagttagattaatagagattgtattaatttaaaggaggatataattaggttttagtcgtaagttattttttttttataagtagtaaaagagttatttagatttaaatggtttttaaataaataattttagaggaaaagtaggtaaaagattgttttataggtagtggtggtaaaagtagttttttgatgagattaaattgaaatttaaaaggaaagttgggaaaaattggttttttttgttatttggatttagatagtgatttttagtaaattatgaaggattttatttaaagttttttggaagtgtaattaagtcgaaatataatacgttatatatatatatatatttttatattaaatgtttttaattagtaatgttttagattttagtataaattatttaaaattaatttttatagtttgagaatgtagttatgaagtaggttaaatttggggtgtttttttaatttttgtttttttatgtttttttttagtttttttatggattgattttttaagataagttgttttgaattttttcgttttacgtgggttgggagtattttttattatagtattaatgattttattttttttttaatgtggaatggattttttataaaaggatgggttaggtgtagtggtttatatttgtaattgtagtattttgggaggttaaggtgggaggattatttgaggttaggagttggagattagtttgagtaatatagtgagatttttgtttttataaaaaatttaaaaaataaatagataggataggagaaaagtgaaattttaaatttaaaatgtatatattttaagaaaagaggaattaatgagggagagaggtttttttgggttatttatagtgggggatattggaggtttaatgatttttttttttttagttttgtttattggaggaaattttttttaggttaaaattattttagtagtttattttttaaaagaattttaggttgtaaatagtttgaggttgtggttatttttgttttggttttagttaggtaatatttaaaattagagtgggaatgaggatttattttaatttagtaattttttttagagttaagtatatatatataattattttaatttttataatttgttaaaatttaaatttattagttaagtattaaaggtgttggatttgggagataaatgttatgaatgatattattgtttttttaaagttagtaattgagtgaattaaaatttagattttttttaatgttcgtaatttttggagtattgatttttttcgttggggaggagtatttcgggaaaattaagttttttaatatagatattttttttttgtttttttttttatttaaagaattattatttttattcgtagtttattaatgggtttaggggaataattttatatttaattaatattttttgttattgtaataatgaagtgagatttattatttaagaaatataagatgggagggaaggggagtgggtatttggggaagtagcgagtttttttatgtgaattttatttgggtaagaattttttgtatgtcggggtttttagtgggtttagtatagagttttagaatttaagcgttggttgagttttgaatttatttttaggtagtttagttaaagttaagagttttatggtgtaaaaatgcgttgttatagagttagaggtatagtataatatagtaaggtggagggaagttagaaaagaagtttgtgtattagggtaggcgagaagaatgtatttgtagtgtttgttatgacgttgtgagtataaagattcgttttttttcgttatgtttagagaggaaatatgtataattagtttgaattttatacgtttttaatgaaaataaatttttatcgttagtgttaataggaatttatatagggttaggagaagagagtttattttaattagtcgtattttcgcgttttgaacggattcgtagtgtggaagttagatagtttattacgaatcgaatcgaatcgaatcgaggagtgtaagtgtgtttcgtttttgcggattagaacgaggtttggaggttttttttttttttttgaagatttatttaagtttatattgaacgttttttttttgtatgggaatttaggtaggaggtatttttaaaaattatttattttatttttatatatttataataaagcggtgttttatttaaaacggttgtagggaatatagggaaaatgataagggtgacggagatttgtatttataggtaaaaggttttaagataaagaggggaaatggggtggggagggaattataggtggggtgaggttagagataggtaggaagggtaggttggttttgtgattaggggttttatagggtagttttaggttgggtagaggtttttaggtcggaaggtagagggttcggtttttaggttatttgttcggttgggaagtgaatttcgttttttttttttgcggttgacgtttttttgatttacggattatataaaggagttggtttttttttaggtttgagttatttttagtttgggggtagttttgagttcgagatgataggagtttgggatagttttagtttggattggttttgagttcgggtagttttagtttggggtgattcggttttaaaagcgagttattaagtttttgggtttttttttatagttttaagttatattttttattttatttgtttttcgtttggtaagggtttataattatttaatttttaataaggttggagaggtgttttttttggtttcgcggaggtttttttttttttttttttttttagaaagataagaaggtattttttagtttttggggggaggtatttgtagttttgtttttgttagtagtagggtttttattgtagtttttattttgaggttggagggtatagaggagttgggggaacggagagaaggggatgagaatggcggggatgagaatggtgggtgatgagggggtaggggtgggagggttgagtggatagagaggagtataggttgagggatggataagtggagggcggaggtaaaaatttttttttgagtacgaaaaattttttagttgttaaaaaatattttttagttgtcggagtttataggtgggaaggaatgtaggattttagtttttttttatttttttcgagagtttaggacggggattagattttaagttttttttagaggttggttgttagtttttttgtttttttcgtttttcgatataagagtttattttttttagttttggttttcgtttcgttacggattcgtcgtttttgtcggtttgaagggtagaggggttttatttcgtttttcgcgttagtgtcgttaggcggcgtttttttacgagtagaacggtcgcgcgggacgtttttcggggtaaggtcgtttttttttaagtttttaattttcgggtagcggatcgtaggtcgttttcgggaaaggttgcgagatgttgagcgcgcgttttaatttaataggaaagtcgggcggagggggaaggcgtttggttcgggattgtatattgggatttttagtgtagtgtttttcgcggggttttggtcgtcgattttcgtttttgtgttttagttttacggcgttcgggagatttatttttttttcggttagtacgtgtagtttttcgcgtattttggtaaaggagttttcgtttagttttttgttgtcgatgaggtagttgtttacgcgtttgtggtgttggaagtcgcggagtcgttcgcggggtacgtcgtttatttaggtaggtaggaaatttttttcgtaggtcgtcgcgggtttggtcgcgtttttcgcgtcgtcgtcgtttttaggcgtcgtcggtttttttaggagttcgtttttcgtcgtcgtcggtatcgcgttcgtcgcggttcgcgcggtttttgttcgtttttcgcgttcgtagttttttttttttaggtttttcggttttttcggtttttttcgtcgtcgttttgggtttagtttcgtttgggttttcgtatttagagttcggggtcgtcgcgattacgtttttcgcgtcgtttagcgaggcgcgtagataatagcggttgtttaggggacgcgggatcggggatttcgtttttaaaagtttttttttttagggtcgttcgggttttttttaggatattaggatttcgtttcgggtttcgtttaggaagttaatgatagtcgttttgttcgggcgcgcggggtggggcgcggttcggcggcgtttgggtttcggggttcgggtgtttgggttcgggagttcgggtgttttcgtagttttcgtttcgtcgtcgtcgtttggttcgtacgggtttgggtcgggttttcgcgatcgtttttagtcgtgcgttgggcggtcgttttcgtcggagagaagcgcgcggcgggttgtcggcgttttttggaaggtagtagaagaaagttttatttagtttgaatttgtagaaatttaattcgttcgcgggcggcgggaatagatgcgagttttatttcgtagttcgtgtatttttaaatttttagtagttttttttttttcgcgcgttatagttaaattcgattttcgttggagaggggagggttcggggaggggagcggcggagtggacggagaagttatttgagcgttagatagggagaatttgcgcggtttcggaggcgcgcgttttcgggtcgtttaggtcgggtcgttttcggttgcgttttttgttcggattttgggtttgggttttttggatttttcggcggtgaaattttttattggtcgtatttattcggggcggggggaagggggaaggttttcgaatttcgtggattgtgagtcgggttgcgtgttcggttttgagttcgttatatagtagggttttttggatcgggggtggaaggatagatggatggttggaagaaagggtggggaggcggttaggcgtttgttcgggttcgtacgtagtttggttggttgtgttggaggaggcgtagttatagtagtaatagtagtagtagtaatgtaggaattagggcgtttgttgtttttgtttgtagtttatattttttttgttttttattgaaatgatgtttgtgattgtaggaggtggatcggcgttcgttttttttcgatgtttttgttttgtaagcgttgtgattgtgtttatcgtataaataattgtaattgttttgacgatattggatttttttttaggatttttaacgtttttttaaatcgaaaatgaagaattttgtgagggagaaggaggagggtaggtaggaggaggtatttataaaatgttatttgttgaggtgttcgtatttgatggaaattttatttcgattatgtaatattagagttgaaaggaaggatttggttttaataaagttttttttattgtttatttttgagtaaataagtatgatatcgatttatagtaatgttttgagattgggagtggggggtgggggaataatagttgttattaatttagtgtttgggggtttcgttgatttatttgaagagggacgtagagaaatgtttgtttttaatatatttaattttaaatacgttattatatttatttatttatttgttataagttattagttttagttattatgacggaatatattgcgttttttgttgttttgttttattgttttcgtttattaatattaaagatatagtttaaaatgttttttttgttgtgttgaagggatttttttgtttttatcggttttgattattttagtaacgtttatttaatttttttaatgtttttaatttagtaattaaattttaataggatagttgtatgggaggggaatggtaattagcgtggtgttagtagaatagatgtttagtaattgtttaaagaatgaggaatatggagtttattttggggtaaaaattattttgaggtcgggcgcggtggtttacgtttgtaattttagtattttgggaggtcgaggtaggtagattacgaggttaggagtttaagattagtttggttaagatggtgaaattttgtttttattagaaatataaaaattagtcgggcgtggtggcgggcgtttgtaattttagttattcgggaggttgaggtagagaattgtttgaatttaggaggcgaaagttgtagtgagttgaaattttgttattgtattttagtttgggcgatagagtaagatttttttttaaaaaaaaaaaaaaaaaaattattttgaattttttattagaaatagtttgggagtttatttaatgttgtgttaatagagtatgattttttttaatgttaggatatgtattttttatgaaaatttagagatttatttattaaggtttaagggaaatttttgagattgttttttaaagtatttttatggtttaaaaaaaaaaagttttataaaaatggtggatgatatttataatgaaatagagattttttttttttttaattatttttttagggtagaggttaggaaaggggtgaagaagagagaaaatttaggtttattaaattttttttaagtttgttgtttgggtttgatttaagtttattgttaattttataagttgggatggatgttaaagagaagtttaaattttattcgtgcgttttttttgtaattggttttggaattataagttttagtttttgaaatggtttgtttaataagaaattattttagaaatgtttttatgtaaaataaattagtatataatatattgtttttatatttagtgtgtagaaagtatttgattatttaatgtaatagtaatgtagttttgaaaattttttgttaattagtttaaattaatttttagttttatttttttgcggagttttcgggtagggggtggtgttggtcgggattcggtttttttattgttatatttttgtttgtgttttgttcgtttttagtttgttgttttcgatttatttttatttagtataggtgtttttttttttatgaagatttttttaattaataagttgtaagaagtttatttttttttgttgttttttagtttatatagttattttatattttttttatgttttgtagtatttattatttatgattttttttttttttagatttattgaggataggagttgtgtttaattttattatttgttttatagtatttagtacggtgtttgagatatgattattgtttagtaaatatttgttgaataaatgaatgaaagtaattatttattgatttttaagtggggttttattgtttttgagagtaagattttattaagttttgggggagataagttattagtgattttttaaaagtatttttaggtgtattgttggttgtttttggggattaataaatataattgtttgttttgtcgaagatggattattttttaatttggatgagttaatttttttagaaataggagtaattttagtgggttgtgaagttttgggaagtttttttagttgattcgtattagttgttttttttttttttttttttttttttattttttcgttttatatggttgggagattgtttttgtgtttttatagaacgttagtttttagatttagttggaagtagttaaagataattagaagtaattaggttggtatagttaggaaatgagagttggttagaaggggttaggttggtagaagtcgtttggtaattggagaaggaacggatggtaaagtaaagacggtagatatggattaattttgtttggaagatattttgtgaattttatatgtttatgtttttaaaataaagtgttttataaataatagattggatttgaattcgtgtttttagagttcgtgtttagtattatttttttataatatttagttgttgaacgtgtataatgtaatggttgaggaagaaagggttttttaggtataaagattcgtgtgtaaaggtagtttagtgtgttattgtagagtaggttattgttagtatttttataatgaaatgtttttttaaaaatgagtcgtgatatttattttttgatgttttagtttttttaagttgtaaaaatgggatattaaggaattgtgtggagttaattagattgtgtatataaagtatttagattagtgtttggtatattataagtataaggtgaattttggtttttatattttttattaatacgattattattattataaattaagagaagttatttaagaatgttttagaggtttattagtataattgttttggtaaatgatgaatttaaaagtataatttttaggttggattttttttttgaaattagagttttatgttaattttttttaattttgtcgggttgtttgataggattttatttatatttaatttgggatatatatatatatatatatatatatatatatatatatttatatatatttttttgtgttttttttttaaggttttatttaaatttattttaaaatttagtagttattttttgttttttttgtttttcgatttttatatttaatttattagtaaattttatattcgtttgtgatttttttttttattttttaagtggtattttttgtttttacgttaaagttaaaattagttttttaaaatgggaattagtaattttagtatttaaggaggttaagggggaagattatttgaggttaggagtttaagattagtttggttaatatggcggaattttatttttattaaaaatataaaaattagtcgggcgtggtggtaggtatttgtaattttagttattcgggaggttgaggtagggagaatcgtttgaattttggaggtagaggttgtagtgagttaagattatgttattgtattttagtttgggcgatagagtaagattttattttaaaaaaaaaaaaaaatgggaattagattatattatttttttgtattcgaaagttgtttaatagatttttgtagaaaagattttttaagcgttttgttatgatatggttttgtttatttttttattgttattttttgggagttagatattaagtttttttttgttttaaaggttttatttttgtgtttttgtttgtttagattgttataataaaatatttagattgggcggtttaaatattagatattttttttttattgttttgaggaatttaagatttaggttttagtagatatatatatatagagatttattttaaggaattgatttatatgatgatggagattgagaaattgatttacgtgatgatggagattgagaa

SEQ ID NO: 521 - DNA, 6292 bp, Artificial Sequence
  chemically treated genomic DNA (Homo sapiens)
attttggttaatacggtgaaattttgtttttattaaaaatataaaaaaattgtttgggcgtggtggtatacgtttgtaattttaggtatttgggaggttgaggtaggagaattttttgaattcgggaggtggaggttgtagtgagttaagagggtgttattgtattttagttcgggtgatatagtgagattttattttaaaaaataaataaatatatatatatataaaattattttgttgtgatgtttatgttagtggttaaggtagtagtatattagcgagtatagttttaggagatttgttggtgttaggtggtagtgatgtatgatatttttgtttatttttagttgttttacggtgtatgaatatttagtttttttgaatttagtttagggtgatgatgaaataacggttagtttggtggttttgagaggtttttatttatattaatagttgtgttttttgtttgatagttggttttaggtgtagtttttagtaaatttattatttgggtatatgatttgggataaaaatatatttagtttttttatggagattgatagtgatattattgtgttataaggagttttgtgagattgggtttagtttaaaaagttgttaaatttatttgattataaatattttttttatgttagatttgttttttttttttttttttttttgagacggaggtttattttattatttaggttggagtgtagtggtgcgatttttgtttattgtaagttttgtttttcgggtttacgttatttttttgttttagtttttcgagtagttgggattataggtgtttattattatgttcggttaatttttttttatatttttagtagagatggggttttattgtgttagttaggatggtttcgattttttgatttcgtgatttgttcgtttcggttttttaaagtgttgggattataggcgtgagttattgtgtttggtttgtaatatcggttaatattggataagtatttaagaaaaaatttattttgtggtaatttatgtataaataatattttatatagttgttaaaatttttttgtagtttaaaataatttttagtaatttttgtttttttttattaattttttgtatttataattatttgtgttaaagttatttattttttttagtaatataggtttaatatttttaatttttattattttatttttatatagaggtatatatttatgttatttttttttttttttttttttttgagatcgagttttattttgttgtttaggttggagtgtagtggcgtgattttggtttattgtaatttttattttttgggtttaagtaatttttttgttttagtttttcgagtaattaggattataggtgtgagttattatatttagttaatttttgtatttttagtagagatagggttttattatgttggttaggttggttttaaatttttgattttaggtgatttatttacgttagttttttaaagtgttgggattataggtttgagttattgtttttggttatatgttatttttttaaagatagaggatttgggggtatgagggtttgaggagggtggacgttgtttagagaggtgagttttaggttaggggagggcggagtatattttattagtggtttttaaatttggttgtttattggaattatttggtaaggtttttagtttttgataattggggttttttttattatttttattttttaaagattttgatttaattggtttaggtagggtttgggtatggagatattttagtagtttaggtgattttaatgtgtttttagggttgagtattattattttgtattatttgttatttggtagttaggtttgtggttaagttggtaagagttaggtggaagaatattagaagaggtagtaggggtagtttatatagtggtagtgggatgggttgtagtatagatgatttggtggattaatatgaataggtgagtagtatgattaattttggttttaagtattatgattacgtatgagatgatgatggcggtgttaatgaagaagtttttagaggttagatattttatttttttatagtggatgatgggatgtttttgtatgttgcgttttattatttgtggtagttatgttttatagttattgtgaatattgaattagcgaatatcgagttattgttttttaggtttttgtgagtttttggatataatatttttattatattatgattaatatataattttatatggtgtgtgtttttgtttaatggatattttatttaatatatggttgatttattatattgagtttataattaatagtatagtagtttttgtttgtaggacggttttttagtgggtacgttatagtttttggtgtttagtaataatagatagtattttagtaagttttacgtttcgggttatttatttttatttttattttttttaatttttttattgtggggggggttttacgatattgtttaggatggttttgaatttttgagttcgagtaatttttttatttcggttttttaaagtgttgggattataggtatgagttattgagtttagtcgtttgggggttattttaaatagtaaaattattaataaaaagtatagaagtgtggaaagtataaattaaatggatagtaaaaagaatataagaaggtagagtatcgttttgttttattatagttgggagggtgtgcgtggggtaatttaagatttttattgttttgggatgtgtatatttatgagtgattgggaaaatattttaagtattgattttgagattataaatatattttagtaagtagataagtttataaatatgatatttgtaaaaatgaggatatattgtatataacgtatttataatatcgattttttttgtttcgtttatcgtatttttttttttttttaaaggtttatttattttgttaaggagttttaattgatttgtattttgtttttgattattgttttttgtgtttaatttagagaaaattggtgagataaattagttattaattaattaattaattaattaatattaatgaattattttaaagtatttaatataatttttgggaggtagagtggggaatagataaatataaaaggtagtgtttttttaaaaggagtttattagtagttgaggagataagtttaatatgggtaaataatgttaaaaagtatttaggtttagtttaaaataatgttgtatattatatatgttatagatgttttaaaaagttgtttattaataggagttttaaataaaatttttttgagaaatagaatttttatgggatattaagaaggaaagatagatatggagaatgattgaatgaagtatttagtaagtataaatgtagtttaagaagtggaaattagtatcgtatcgtttttttttaaataagaatgaagagatgaatttagtgaggataattttgtgaggagttagggagttggggagttggttgtaagtttaggtaagtttgatgatgttttgttttttattttgagagatattttattaaaaatattgatagatatttttgatagattaattaatattaaacgtttttgaattttatttttatttgttatatacgtttagttaggattttaaggatttattagtagtagtagaaattttaatgtagggttaatatatttgagaggttatttttaagaaaagtttaggtaataggtttttaggtagtgaattattttgtaggatttattgttttttgttttattttgttttgttttgttttttttttatttttttatttttttttataggatttttgataggttttaattatatatttttttatgggtatttttatgggtaatttattttttttttttagtagtaaattaataattatatattagtgaatattataggtataaattatttttttttttttaaggaattagtatgtaaattttagtattttttttttagtaataaataattgttgtattagattgtgttataaggtagttgttttgatttattgttttgtagttggggttagtttttttagaatattgttaatgagagaaaggaagtgttttgggtagtgtttggtttattaggttttttgtaaatgtttgttattaatgtaatgttgagattttagtgaatagaatttggtttagaagaagtgggtatttacggtgttcgagtttaattttatattttggatttgtaagtggtatttattgagttgaatatgagtttgagtacgcggttatatatttttttagtaaatattggttaggtattagttgttacgtgtaagtattgttttatatgttgggacgtagttgtagtaggaatgaaataacgttagtatttttgtatgcgggtagtgcgggttttgtatagaaaggtatacgagataggtatttttatatttattgttttgggaggaaattgaggttttgagaaacggagaatttgtcgggttatttgattttacgttatttttttttttattaatgttttgaatagttttttgtatatttttaaggaatttattttgtaatgattattaagaatttagcgagatttcgagtattatttcggtatatcgtattttttttttagagaatttttaatgttggaagggattagagcgtatttttttcgtttttgggagtattttttttttaataatattttggggatgggtcggaaggaaaggaaaggagacgcgagaggtgtagtcgatgtgtttgcgaagtttaggtttttttggagattttttcgttcgtttttataggagaaggttggttcgggttgttttatttttcggagttgtagattgagtcgttaggtttttgtgtttttaaagttttgcgcgacggttatattaaatatttaaattttgggtagggattaaacggttattttttcgtttttcgggtttaatatgtaaattcgagtattaggaagtagttgggatttttcggtcgagtttagagatagttagtttttttttcgtcgcgtcgggtcgcgttgtcgttcgtttttcggtcgtggcgttttcgggttagacgcgttgtagtttttagttcgcggtaagcggggcggtcgcgttattttcggtttcgcgttagtagtttttcgtcgcgcgtttagcgttttcggttagtagtttttttatacgtaggttttgttgggtcgtttcgtcgcgttttttattttgaatttaagttatcgtggagtttcgtcgtttcgaaatttttatcgcgagcgggtgagttttttgcgcgagtttaagggtgggcgcgggtacgcgggtagtgggtgtaggggtcgcggttgtgttattagtcggagtttcgggcgtagggtagattcggggtcgggggtatcggcgcggttcgcggggcgttttttggtcgtatcgtttttgggtttcggcggcgaaggtttttagatgtttttagtcgacgggtgatcgggttcgggggagttagggcgcggggattgaggtttcgtaggtgttcgtcgcggagtcgcgtaggggagcggtgggaggtgcgggcgcgggggcgggttttcgcgtgtttttttcggtgagggttcgagggtcggttgttgtttttgtttcggtcgtttttcgtatatagtggggaagtcgttgtttttgcggagcgggcgcgcggcggggatattggagaggatttttcggattgtgtaatttgattttttttttggattttgggttttttggtagtgggagatggggttcggtcggcgttttttcgaggttcgcggatagttgttttttttggtggtttcgggtaggagcgtgacgtcgaggggttgtagcggaggttggaatttattttttcgttgcggcgtttttcggtttgtcgaggagtagttcggtgtttttgtcggttgagaggaagcgagagttattttaagaatttaggggttgtttttttttcgttttgggggaagggcgtaagagttagtttttatttttttgtattttttgggtttatggtggtattttttgtttgcggtgtattcgtaattttttaatagtttgtttgttatgtggattagcggttgtgtttttgtatattcgagtgtgttaattattttaaattcgttttttttcgttagtttagaatttaggttttgtatttttttggttgtatatttaggggatcgattattgaaattttttgtttgagtttttttatttttgagagagtatatatattttaggggttgtttagtata

SEQ ID NO: 522 - DNA, 6292 bp, Artificial Sequence
  chemically treated genomic DNA (Homo sapiens)
tgtattaaatagtttttgaggtatatatgtttttttaaagatgaagaaatttaaatagggaattttaataatcggttttttaaatatatagttagaaaagtgtaaggtttagattttgagttggcgaagaagggcgaatttgggataattaatatattcggatatataaaaatataatcgttaatttatatgataggtaggttgttggaaagttacgaatgtatcgtaagtaaaagatgttattatgggtttagagaatgtaggaaagtgggaattgatttttacgttttttttttaaggcgaaggaaaggtaatttttgaatttttaaaataattttcgtttttttttagtcggtaaaagtatcggattgtttttcggtaggtcgagaggcgtcgtagcgggagggtgagttttagttttcgttgtagtttttcgacgttacgtttttgttcggggttattagggagggtaattgttcgcgggtttcgagagggcgtcggtcgagttttattttttattgttaggagatttagggtttagaggggagattagattgtataattcgaggagttttttttagtattttcgtcgcgcgttcgtttcgtaagggtagcggtttttttattgtgtgcgagaagcggtcggagtagggatagtagtcggttttcgggtttttatcgggaaggatacgcgggagttcgttttcgcgttcgtattttttatcgtttttttgcgcggtttcgcggcggatatttgcggagttttagttttcgcgttttggttttttcgggttcggttattcgtcggttgaagatatttaagagttttcgtcgtcggggtttagaggcggtgcggttaggaagcgtttcgcgggtcgcgtcgatgttttcggtttcgagtttattttgcgttcgggatttcggttggtggtatagtcgcggtttttgtatttattgttcgcgtgttcgcgtttatttttgggttcgcgtagaggatttattcgttcgcggtgaaagtttcggggcggcggagttttacggtgatttgagtttagagtggggggcgcgacggggcggtttagtaggatttgcgtatggggaggttgttggtcgggaacgttggacgcgcggcgaggggttgttggcgcggggtcgggggtggcgcggtcgtttcgtttgtcgcgggttggaggttgtagcgcgtttggttcggaggcgttacggtcggggagcgagcggtagcgcggttcggcgcggcgggagaggaattggttgtttttgggttcggtcgagaggttttagttattttttggtgttcggatttgtatattgagttcggagggcggggaagtgatcgtttggtttttgtttaaggtttgggtgtttggtgtggtcgtcgcgtagggttttgaaggtatagaaatttggcgatttagtttgtagtttcggggagtggagtagttcgggttagtttttttttgtagggacggacggaaggatttttagaggagtttgggtttcgtaggtatatcgattatatttttcgcgttttttttttttttttttcgatttatttttaaggtattattaggaagggggtgtttttaggagcggaggaggtgcgttttgattttttttaatattaggggttttttagagaaaggatgcgatatgtcgaggtgatgttcggggtttcgttgagtttttaataattattataaagtaagttttttaagggtgtataggaggttgtttagggtattgatgggggaggggatgacgtagagttaaatggttcggtaagtttttcgttttttaaagttttagtttttttttaggataatggatgtgaggatgtttatttcgtgtatttttttgtatagggttcgtattgttcgtatgtaggaatgttggcgttattttatttttattatagttgcgttttagtatgtagggtagtgtttgtacgtagtagttggtgtttaattagtgtttgttgaaagaatgtgtgatcgcgtgtttaagtttatgtttaatttaataaatgttatttataaatttaagatgtaagattaggttcgggtatcgtggatatttattttttttaagttagattttgtttattgggattttagtattgtattaatagtaaatatttatagagggtttgatgggttagatattgtttaaagtatttttttttttttattaataatgttttgaagaggttgattttagttatagagtaataagttaaagtagttgttttgtgatataatttgatatagtagttatttgttattaggaaaagagtattaaagtttgtatattaattttttaaaagaagaaaggtggtttatatttgtgatgtttattggtatgtagttgttagtttattgttgaagagaaggggtgggttgtttatggaaatatttatgggaaggtgtgtgattgaaatttattaagaattttatggagaaaaatagaaaaatgaaaaaagaataaaataaaataaaatgaaataaaaaataatgaattttatagaataatttattatttgagggtttattgtttagattttttttaagaatgattttttaaatatattaattttatattaaagtttttgttgttattgatgaatttttgagattttgattaaacgtgtgtggtaaataagaataggatttaaaaacgtttggtattggttaatttattaggaatgtttgttagtgtttttggtaaaatgttttttagggtaaggaataaagtattattaggtttatttgagtttgtaattagttttttaattttttaattttttataaaattgtttttattaagtttatttttttatttttatttggaaaaaaacgatacgatgttaatttttattttttaggttgtatttatatttgttgaatattttatttaattattttttatatttgttttttttttttaatgttttatgaaagttttattttttaggaaagttttatttaaagtttttattgataggtaattttttaaagtatttgtagtatgtatggtgtgtaatattattttaaattagatttaggtattttttagtattgtttgtttatgttaggtttgtttttttaattattggtaaattttttttgggaaggtattgttttttatatttatttattttttattttattttttagaaattatgttgggtgttttaaaatagtttattagtattgattgattggttaattgattgatgattgatttattttattagttttttttaaattgagtatagaaggtagtgattagaggtagggtgtaaattaattaaggttttttgataggatagatgggtttttgaagaaaggaaggaatacgatgggcggggtaagagaagtcggtattgtaaatacgttatgtatagtgtatttttatttttgtagatattatatttgtgaatttatttatttgttaaaatgtatttgtaattttaaaattaatatttgaggtgtttttttagttatttatagatatgtatattttagagtagtaaaaattttgagttgttttacgtatatttttttagttatagtggaataaggcgatgttttgtttttttgtattttttttgttgtttatttagtttatgttttttatatttttgtgttttttgttggtgattttgttgtttaaaatggtttttaagcgattgagtttagtggtttatgtttgtaattttagtattttgggaggtcgaggtgggaggattgttcgagtttaggagtttaagattattttaggtaatatcgtgagattttttttataataaaaaaattaaaaaaaataaaaataaaaataaatggttcgaagcgtagagtttgttaaagtgttgtttgttgttgttaagtattagaggttgtggcgtgtttattggagaatcgttttgtaggtaggagttattgtgttattggttgtgaatttaatgtaatgaattagttatatattaaataaggtgtttattaaatagaaatatatattatataaggttatgtattaattataatgtaatgaaaatgttgtgtttagagatttataggaatttaagaagtagtgattcggtattcgttaatttagtgtttatagtgattatagaatataattattataaataatgggacgtagtatataagagtattttattatttattgtgggaaaatgaaatatttgatttttaggaatttttttattagtatcgttattattattttatgcgtggttatggtgtttgaggttaggattggttatgttgtttatttgtttatgttggtttattaaattatttgtgttgtaatttattttattgttattgtgtgggttgtttttgttgttttttttagtatttttttatttaatttttgttaatttggttatagatttaattattaagtagtaaataatatagagtagtggtgtttaattttgggggtatattagaattatttgagttgttaaaatatttttatgtttaggttttatttagattagttaaattaaagtttttgggggatggggatggtgaggggaattttaattattagagattgaaaattttgttaggtggttttaatgagtagttaagtttgggaattattggtggagtgtgtttcgtttttttttagtttggagtttatttttttgaataacgtttattttttttaagtttttatgtttttaggttttttgtttttaagagagtagtatgtggttaggggtagtggtttaaatttataattttagtattttgggaggttgacgtgggtggattatttgagattaggagtttgagattagtttggttaatatggtgaaattttgtttttattaaaaatataaaaattagttgggtgtggtggtttatatttgtagttttagttattcgggaggttgaggtaagagaattgtttgaatttaggaggtggaggttgtagtgagttaagattacgttattgtattttagtttggataatagagtgagattcggttttaaaaaaaaaaaaaaaaaaaaaagtagtatggatatatgtttttgtgtgagggtaaagtggtaaggattgagaatattaaatttgtattattggggaaaatgggtgattttagtataagtgattatagatataaggaattaataaagaaaaataaaaattgttaagaattattttaggttataaaaaaattttaataattatatgaaatattatttatatataaattgttataaggtagatttttttttaaatatttatttaatgttaatcggtattataggttaggtatagtggtttacgtttgtaattttagtattttgggaggtcgaggcgggtagattacgaggttaggagatcgagattattttggttaatatagtgaaattttatttttattaaaaatataaaaaaaaattagtcgggtatggtgatgggtatttgtagttttaattattcgggaggttaaggtaggagaatggcgtgaattcgggaggtagagtttgtagtgagtagagatcgtattattgtattttagtttgggtgatagagtgagttttcgttttaaaaaaaaaaaaaaaaaaaaaataggtttgatatggagaaagtatttatggttaagtaggtttggtaattttttgagttgaatttagttttataaagttttttgtagtatagtgatgttattgttaatttttatgaaggagttaagtgtatttttgttttagattatatatttaggtgatggatttgttgaaagttgtatttgggattagttgttaagtagaagatatagttattgatgtgaatagagattttttagagttattaagttagtcgttgttttattattattttaaattaaatttagaaaagttgaatgtttatatatcgtaagatagttgagagtgggtaggaatgttatgtattattgttatttggtattagtagattttttggaattgtgttcgttgatgtgttgttgttttggttattggtataggtattatagtaaaatagttttgtgtgtgtgtgtgtttatttattttttgagatggagttttattgtgttattcgggttggagtgtaatggtatttttttggtttattgtaatttttatttttcgggtttaagggatttttttgttttagttttttaagtatttgggattataggcgtgtgttattacgtttaggtaatttttttgtatttttagtagagatagggttttatcgtgttagttaagat

SEQ ID NO: 523 - DNA, 5586 bp, Artificial Sequence
  chemically treated genomic DNA (Homo sapiens)
tattttaattcgaattgacggttgattttatagaaatttgtaatttattgatattattatatatttgttgtttgttattttttttttgtttttatatgtttttttatatagtttatattttaggttaattattaattatgattgttttggttaggtgtaatggtttatgtttgtaattttaatattttgggaggtcgaggtagatggattatttgaagttaggagtttgagattattttggttaatatggtaaagttttgtttttattaaaaatataaaaattagtcgggtatggtggcgggtatttgtaattttagatattcgggaggttgaggtaggagaattatatgaattcgggaggtggaggttgtagtgagttgagattgtgttattgtattgtagtttgggagatagagggagattttattttaaaaaaaataaaaataaaaataaaaaaataatagaaaaataaaaataaataaaaattttattgttttgtatgtatgcgtgtattttttagtaaatatttgttgaatatttattatgtgttagatattattttaggtttaggggatatattagtgaatacggtagatatattttttgttttgtagagtttattttttggtggtaggggataaataataaataaattaggttaggtatggtgatttatttttgtaattttagtatttcggaggttgaagtggaaggattattttgagtttaggaggttaaagttgtagtgagttatggttgtattattgtatattagtttgggtaatagagcgagatttgttttaaaatagagaaataaagtggttatattatatgttagaatagtggtttttaagttggggttattttggtattttaggggatatttggtaatatttggagatatttttagttgtttttattgcgggagttgaattggtggtatttagtgggtagaaattatagatgttgttcgttattttataatgtataggatagttttagttatagaattattcgattttaagcgttaatagtgtttttttttagagttcgtttagaaggtgttaatgttaataaagtaaataaataaataataataataataataaaaaaaacgtagagcgggttggtcgcggtggtttatgtttgtaattttagtatttagggaggttgaagtgggcggattatttgaggttaggagtttgagattagtttggttaatatggtaaaattttatttttttaaaaaaatataaaaattagttaggtgtggtggcgtgtatttgaagtgtatttgaagaggtcgaggtaggagaattgtttgaatttgggaggtagaggttgcggtgagttaaggtcgagttattgtattttagtttgtgtgatagggtgagatttcgttttagaaaaataaaataaaaagaaaaaaaaaatataaagtagggttgagggatggatagaggaatttcgagtggagggtgtgatttgaagtagaatggttaggtttgtgttagtttttttgaggtgacgtttgagtaatattgtgaaggtggggaattcggtagatatttggagagaagatggtaatttattgggttttttattttattgagaaaatttaattatttattatatatgtttaggtagtaggttttttttttagtttttgcgaataaattgtttgtgtttttagttaaggttaaatttgttatttaagaatgtatttttattttttgtttaaggttatcgttttcgtaatttttttattaattagtaataatttatttgattttttttttttttagttatttaatgtatttttatttttttttttttttttgttgtaaagattttaaaagatttttgtattattattgtttttaatttttttttttttattggttttgagtttaagtttataagatttttgtttttaaagagttttttattttttaatttttttttttttatttgagatagagtttcgttttgttatttaggttggagtgtagtggcgcgattttggtttattttaatttttatttttcgggtttaagcgatttttttgttttagttttttgaatagttgggattataggtacgtgttattatatttggttaatttttgtatttttagtagagacggggttttgttatgttggttaggttggttttaaatttttgattttaagtgattcgtttatttcggttttttaaagtgttgggattataggcgtgagttatcgtgtttagtttggtttttgtttttgttgttgttgtttttagggataggattttattgtgttatttaggttggaatatagtggtgcgattatagtttattgtagtttcgaatttttgtttgagttttttgagtagttgggattatatggtgtatattattgtgtttggttaatttaaaataattttttttttttttgtagaggtagggttttgttttgttgtttaggttggtttggaatttttggttttaagtagtttttttgttttggtatgttaaagttttgggattataggtgtgagttattgagtttagttttgattgtttttgaaatataaagtggttaaagtttgtaatgttattatttttggaaggttgaggtaggtagattatttaaggttaggtgtttaagattagtttggttaatatggtgaaattttatttttattaaaaatataaaaattagtcgtgtgtggtggcgggtgtttgtaattttagttattcgggaggttgagataagagaattatttaaatttgggaggtagaggttgtagtgagttaagatcgtgttattgttttttagtttgggcgatagagcgattttgttttaaaaataaataaataaataaataaattaattaattaattaaattaaattaaatttaaagtcgtatattttcgagttgttttagttttgggttagtttggaaggttggttattttgtttattagtttttttattgatgttttttttttgttttaggatttgatttagaatattatattgtatttagttgttttgtttttttggttttttatttgtaatgatttgtgggtttttttttattttttatgattttggtttttttgattttttttgttttttgtttttgaggcggggttttattgtgttgtttacgttggagtgtattggcgtgatagtttattgtagttttgattttttgggtttatataatttttttgttttagttttttgagtagttgggattataggtgagtattattatatttggttaattttttgtttttgtagagttcgggtttttttatgttgttcgggttggttttgaatttttggttttaagtaatttttttgttttagttttttaaagtgttgtaattataggtatgagtttggtatgaatttgatattattgagatatattggttaggtattttgtggaatgttttttaattttgttttgttagatgtttttttatgattagaggagagttataaattttgaggaaaatttagagaggtgaagaggtgaagtagggtagaaatttaatttgttttatttattgttatatatcgagtgtttggaatttggtttatggtaagtattaaaaatttgttttttttgaatgaataagtaaataaatgagtgatcgtggaaatttagtattattttaaagttttaaagcgttgttgatataggttaggtatagtggtttatatttgtaattttagtatttttggaggtcgaggtaggaggattatttgaggttaggagttcgagattagtttgattaatatggtgatatttttgtttttattaagtaaaatataaaaattagttaagtgtggtggtaggtatttgtaatttcggttatttgggaagttgaggtagaagaattatttgaatttgggaggtagaggttgtagtgagtcgagattattttattgtattttagtttgagtgatagagcgagattttgttttaaaataaataaataaataattattttttggtcgggtaaggtggtttacgtttgtaattttagtattttgggaggttgaggcgggtagattatttgaggttaggggttcgagattagtttggttaatatggtgaaattttatttttatttaaaatataaaaagttttttgggtgtggtggcggacgtttataattttagttatttgggatttttttttaagacggaattttattttgttgtttaggttggagtgtagtggtaagattttggtttattgaagttttcgttttttaggtttaagggatttttcgcgttttagttttttaagtagttgggaatttttgtttttgtaaaaaaaaaaaaaaaaaaaaaaaaaaaatatatatatatatatatatgtgtgtgtgtgtgtgtgtgtgtgtgttatatgtatatatatttatgtatatgtatatatatataaaattaggcgggagtggtggcgtacgtttgtgattatagttattcgggaggttgaggtacgagaatcgtttgagttcgtgaagtcgaggttgtagtgagtttagatcgagttattgtattttagtttgggcgaaagagaaagatcgtgttttaaaataaataaataaaagttatttttagtacgtgttagagtatttcgcgggcggaagtgggaaacgagtgttgtatatagagtaggtatttttatatgttaatagatattgatatttagttaaagcggttgaatatatttattttttggtagtgtttaaaagtatttgttttttttatattgttttattttaattttttttggattaagtaatttgatttttttttttataatttgtcgatcgattcgtgatagtaaaatcggtagaagttcggcgattttttatttcgagtttgtaggtagtgttttcggattatattttttagaaggtattgcgggtacgttttttgtttggtcggtttgaagggaagggttaatttttgagtatttcgggaaggaggtgttcggagtcgcggatttagagattttagaagttatagcgtagcggttcggttcgttattatttttaggttttgcggggtaggggtgggtttagattttatttttcggcgggtagtgcgattttaggggcgggattttatgttttagtaggtttcgggcggcgtgcgtcgcggtgtttagtgtgggatgtaagcgcggaggtgggcgagggggatcgaggttaggattttttttggggtttgggggtttgatttgggtgcgttttttggatagattttatagtttcgggggtatagtcgtagagagggggcggggcggttattggggttttttattggggtgtttggggcgtattttatcgggtatcgggcgtttcggaattgtgggggataaaaaggttttgtagtttcggttgaggggttttatcgataaaagaaggggaagtcggtgagtagaggttgaagagggtggggaagtaggggagttgtgcgtgtgtcggggcgggtggaattttagcggattttgggaggaggtttttcggtcgaatttgttcgattttttttttttcggtttgttttgtagg

SEQ ID NO: 524 - DNA, 5586 bp, Artificial Sequence
  chemically treated genomic DNA (Homo sapiens)
tttgtaaggtaagtcgggggagggagggtcgggtaggttcggtcggggagtttttttttagggttcgttaaggttttattcgtttcgatatacgtatagtttttttgtttttttattttttttagtttttgtttatcggttttttttttttttgtcggtgagattttttagtcgagattgtagagtttttttgttttttataatttcgggacgttcggtattcgatggggtgcgttttaagtattttaatgaggagttttaatggtcgtttcgttttttttttacgattgtgttttcggggttgtaaagtttgtttagaaagcgtatttaggttaagtttttaaattttaaggagagttttggtttcggtttttttcgtttattttcgcgtttatattttatattaggtatcgcggcgtacgtcgttcggagtttgttgggatatgaagtttcgtttttagggtcgtattattcgtcgggaagtggagtttgggtttatttttgtttcgtagagtttggaaatagtggcgggtcgggtcgttgcgttgtggtttttgggatttttaggttcgcggtttcggatatttttttttcgagatatttagggattggtttttttttttaggtcgattaggtaggaagcgtgttcgtagtgttttttggaaaatgtagttcgggggtattatttgtagattcggggtgggaggtcgtcgagtttttgtcggttttgttgttacgggtcggtcggtaagttatgaggaaaaagattaggttgtttgatttagaaaaaattaaaataaaataatatgagaaaaatagatatttttaaatattgttagagagtaaatgtgtttagtcgttttagttgggtattagtgtttgttaatatataaagatgtttattttgtgtgtagtattcgttttttattttcgttcgcgagatattttaatacgtgttaagagtagtttttgtttgtttgttttgagatacggtttttttttttcgtttaggttggaatgtagtggttcgatttgggtttattgtagtttcgattttacgggtttaagcgattttcgtgttttagtttttcgagtagttgtgattataggcgtgcgttattattttcgtttaattttgtgtgtatgtgtatatatataaatatatatatatataatatatatatatatatatatatatatatatatatatatatatatattttttttttttttttttttttttttttgtagagatagggatttttagttatttgggaggttgaggcgcggggaattttttgaatttgggaggcggaggttttagtgagttagaattttgttattgtattttagtttgggtaatagagtgagatttcgttttaaaaaaaagttttaagtagttgggattataggcgttcgttattatatttagaaaattttttgtattttaagtagagatggggttttattatgttggttagattggtttcgaatttttaattttaagtgatttgttcgttttagttttttaaagtgttaaaattataggcgtgaattattttattcggttaaagagtagttatttgtttatttgttttgagatagagtttcgttttgttatttaggttggagtgtagtggggtgatttcggtttattgtaatttttgttttttaggtttaagtgatttttttgttttagttttttaagtagtcgggattataggtgtttgttattatatttggttaatttttgtattttatttagtagagataggggtgttattatgttggttaggttggtttcgaatttttgattttaagtgatttttttatttcggtttttaaaagtgttgggattataggtgtgagttattgtgtttggtttgtattaataacgttttgaaattttgaaataatattaaatttttacggttatttatttatttgtttatttatttaaaaaaaatagatttttggtatttattatgggttaagttttagatattcggtatatagtagtaaataaaatagattaaatttttgttttattttatttttttatttttttggattttttttaaaatttataatttttttttaattatgagaaaatatttggtaaaatagagttgagggatattttataaaatatttgattagtatattttaatagtgttaagtttatgttaggtttatgtttgtaattataatattttgggaagttgaagtaggaggattgtttgaggttaggagtttaagattagttcgggtaatatagggagattcggattttataaaaataaaaaattgattaggtgtggtggtgtttatttgtagttttagttatttagaaggttgaggtaggaggattatgtgagtttaggaggttaagattgtagtgagttgttacgttagtgtattttagcgtgggtaatatagtgagatttcgttttagaaataaaaaataaaagaaattaaaagagttaaggttatgaaagataaggaaagatttataaattattgtagatgagagattaaggagatagaataattaaatgtaatgtggtgttttggattaaattttggaatagaaaaaggatattagtagaaaaattagtaaatagggtaattagttttttaagttggtttagaattgaggtaattcgggagtatgcgattttgagtttaatttaatttaattaattaattaatttatttatttatttatttatttttgagatagagtcgttttgtcgtttaggttggagagtaatggtacgattttggtttattgtaatttttgttttttaggtttaagtgatttttttgttttagtttttcgagtagttgggattataggtattcgttattatatacggttagtttttgtatttttagtagagatggggttttattatgttggttaggttggttttgaatatttggttttaggtgatttatttattttagttttttagaagtggtggtattataggttttagttattttgtgttttaaaaatagttaaagttaagtttagtggtttatatttgtaattttagggttttgatatgttaaggtaggaagattgtttgaggttaaaagttttagattagtttgagtaataaagtaagattttgtttttataaaaaaaaaaaaaattattttaaattagttaggtatagtggtgtgtattatgtagttttagttatttaggaagtttaggtaggagttcgaggttgtagtgagttgtgatcgtattattgtattttagtttgagtaatatagtgagattttgtttttaaaaataataataataaaaataaaagttagattgggtacggtggtttacgtttgtaattttagtattttgggaagtcgaggtgggcggattatttgaggttaggagtttgagattagtttggttaatatggtaaaatttcgtttttattaaaaatataaaaattagttaggtgtggtggtacgtgtttgtaattttagttatttaggaggttgaggtaggagaatcgtttgaattcgggaagtggaggttggagtgagttaagatcgcgttattgtattttagtttgggtgatagagcgagattttgttttaaataaaaaaaaaaaaattaaaaaataaaaggttttttgggagtaaaagttttgtaggtttgggtttaggattaatgggaggaaagaaattggagatagtgataatatagaagttttttgggatttttgtagtaaagggaaggaggaaaatgagagtgtattaaatagttagagaagaggggggttaaatagattattgttggttaataagagaattgcgggagcgatggttttggatagagagtgggaatgtatttttgagtggtaggtttggttttggttaggagtataggtagtttattcgtaaggattggaaagaaggtttattatttgggtatatgtggtgggtaattagatttttttagtgaaataggaagtttagtgggttattattttttttttagatgtttatcggattttttatttttataatattgtttaaacgttattttaaaaaggttgatatagatttgattattttattttaaattatattttttattcgaaatttttttatttattttttaattttgttttatattttttttttttttttgttttgtttttttgaaacggagttttattttgttatataggttggagtgtagtggttcgattttggtttatcgtaatttttgttttttaggtttaagtaatttttttgtttcggtttttttaggtgtattttaggtgtacgttattatatttggttaatttttgtgtttttttggagagatggggttttgttatgttggttaggttggttttaaatttttgattttaggtgattcgtttattttagtttttttaagtgttgggattataggtatgagttatcgcggttagttcgttttacgttttttttgttgttgttgttgttgtttgtttgtttgttttgttagtattaatattttttagacgggttttggaaggaggtattgttgacgtttgaggtcgggtaattttgtgattggggttgttttgtgtattgtaggatgacgagtagtatttgtggtttttatttattggatgttattagtttagttttcgtagtggggataattaaagatgtttttagatgttgttaaatgttttttgggatgttaaaatagttttagtttgagaattattattttaatatatgatatgattattttgtttttttgttttgagataggtttcgttttgttgtttaggttggtgtgtagtagtgtaattatggtttattgtagttttgattttttgggtttaaggtggtttttttattttagttttcgaagtgttgggattataggaatgagttattatgtttggtttgatttatttattgtttgttttttattattagaagataagttttataggataggaaatgtgtttgtcgtgtttattgatgtgttttttgggtttagaatagtgtttggtatataataggtgtttaataaatatttgttaaagaatatacgtatgtatgtaaagtagtagggtttttgtttgtttttatttttttattgtttttttatttttatttttattttttttgagatggagtttttttttgttttttaggttgtagtgtagtggtataattttagtttattgtaatttttatttttcggatttatgtgatttttttgttttagtttttcgagtatttggaattataggtgttcgttattatgttcggttaatttttgtatttttagtagagatagggttttgttatgttggttagggtggttttaaatttttgattttaggtgatttatttgtttcggttttttaaagtgttgggattataggtatgagttattgtatttggttaaagtagttatgattaatgattgatttggaatgtaggttgtgtgaggaggtatgtaaggataagagaagggtgatagatagtaaatgtgtagtaatattaatggattgtaggtttttgtggggttaatcgttaattcgagttggggtg

SEQ ID NO: 525 - DNA, 5371 bp, Artificial Sequence
  chemically treated genomic DNA (Homo sapiens)
tattattttttttgattttattagttgtattttataaaaaatttttatttttggagatttatttgaaagatgaggtaaagggatttttgtaagtatatttaaaattagaagtttaggtttttgtttttttttttggagttaagggttgtaatttagggtaattgtaaaatatatgtaaatagtgaagagataatttattttgaattttagttttattttttaatttttgaaagttttgtttttttatttttaaagtgaggataatgaaaatagtatttgttttttgaggttgtgagattgagataacgtggttgagaattgggtatatgttaatttatgttagtattaatgtgttgagggttttggtttttttttttttttttttttttttttttttggttttgttttgttttgtttttgtttttgtttttttttgagacggaatttcgttttgtcggagtgtagtggtgtaattttggtttattgtaatttttattttttgggtttaagtgatttttttgttttagttttttaagtagttgggattataggtatgtggtattatgtttggttaattttggtatttttagtagagacggggtttttttatgttggttaggttggtttcgtatttacgattttaggtgatttatttgttttagttttttagagtgttgggattataggcgtaagttatcgcgtttagtcgattatttttgttttttagaaaattattttgtttgtttttttattagtatttttgatggttttttagagttttattttttgaagttttaattgttggtataattatattttaaaaggttgaattttagaattattatttgaaaattcgtattattagtggtttttttttatgataaattatggataaattaagtttgagtttgtaaattttttggatattaattttttattatttttggaagagatggaggaggtgttagttattttggttgatattagttttaggtttgttttgttttaggagtttttttattttaattatagattaaattgtatatttttattttcgaattatttaaaatataattttaaattataagatagaataaaataatttttgagagaggtagaattttagaaaggagatattttattttatttattttatagatgaagaaagtaaattttagagagattaaagtgatttgttttaggttatataattagtggtagaaagaagagaattgttggaatgttaagataagaatgaattttaggtttaaagttgtttaagtatattttaaattaaatattttatttttgagttttaaaatttatttatattgaagtttgatgttttaaatacggtaattataaagttgggtaatggtttttattttttttttttatgaatttatgtatgaaagttagttttattaaattattttatttttagaaaggtatgtatattttatattgtttaagtttgtaattgttagtaaaattagatttaagatcgttagttttttaatttagtttatagattgtttttttaatagatatattggatttttagggaggtagaatgggtaagttttaataaaggatagtatttttgtgatggtgtggaagtattaaaggtttgattgtattttaaaaaggtgatatggacggttgggtgtagtgatttatgtttgtaattttagtattttgggaggttaacgcgggtagattataaggttaggagatcgagattagtttgattaatatggtgaaattttgtttttattaaaaatataaaaaaattagttaggtgtggtggcgtgtgtttgtagttttagttatattggaggttgaggtaggggaatcgtttgattttaggaggtagaggttgtagtgagttaagatcgtgttattgtattttaatttgggcgacggagcgagattttgttttaaaaaaaaaaaaaaaaaggtgatataggtgtagaaataggttagaaatgatttaagttaagtttgtttaattcgttatttaggggttatatgtggtttaggataattttgggtgtagtttaatataaatttataaatttttaagaaatatgagattttgttgtaattttaagtttattggttattgttagtgttagtgtattttatgtatggttgaagataattatttttttaatgtggtttaggtaaattaaaagattggatatttaatttaagtgagtttaatttttaaatttattataaaattatattaattaaaatagtgtgttattttatatttattaggatggtaataaagaaaattaaaaaataataagtgttggtgatgatgtggaaaaattggaaattttgtgtattgttgatggaaatgtaaaatagtgtagttatggaaaatagtatggtaatttttggaaaaattttaaatggaattagtttatgatttagtgattttatttttgggtatatatttaaaataattgaaagtaggttttaaagaggtatttgtatatttatatttataatagtattatttataatagttaaaaggtagaagtaatttaaatatttattgatatatgaatggatagataaaatatgatatatatatataatggaatattatttagttttaaaaaaggaaattttgatatgttataatatggatgaaatggaagatatgttgagtgaaattatttagttataaaagaataaatttttttttttttttttttgagatagagtttcgtattgttatttaggttggagtgtagtggcgtaatttcggtttattgtaatttttgtttttcgggtttaagtgatttttttgcgttagttttttgagtagttgggattataggtgtttgttattacgttttgttaattttttgtatttttagtagagacggcgttttattatgttggttaggttggtttcgaatttttgattttatgtgatttattcgttttagttttttagagtgtagggattataggtgtgagttatcgtatttagtttataagaataaatattatatgattttatttatatatgagtagataaatattagagtagataaatttatagagagaaagtagaagggtggttgttaggaatttgggaaaagagggaaatggggagttattgtttaataatatagagttttagttttgtaagatggaaaatgttttgtggacggatgggaggtattgagggttgtataatcgtgtgaaatatagttaatgttagcgaattgtatatttaaaaatggttaaaatggtaatttttacgtaatgtgtatatatatttatagatttatagatatttagatatttgtagatttatagatttatagatagattttttttgtttgagacggagtttcgttttgttatttaggttggaatgtagtggatcgatttcggtttattgtaagttttgttttttaggtttacgttatttttttgttttagtttttcgagtagttgggattacgggcgatcgttattacgttcggttaattttttgtatttttagtagagaaagggttttatcgtgttagttaggatggtttcgattttttgatttcgtgattcgtttgtttcggttttttaaagtgttgggattataggtatgagttattacgttcgtttatgtaatgtgtattttatagtttaaaaaaaaaatttataaaatagtgtggtatttagatatagattattggaataaaaatttagaaatagatttatatatatatggttataaggcgaaggtaatttaatgtataagagtttttttaggtcgggcgcggtggtttacgtttgtaattttagtattttgggaggtcgaggcgggcggattacgaggttaggagatcgagattatttcggttaaaacggtgaaatttcgtttttattaaaaatataaaaaattagtcgggcgtagtggcgggcgtttgtagttttagttatttgggaggttgaggtaggagaatggcgtgaattcgggaggcggagtttgtagtgagtcgagatttcgttattgtattttagtttgggcgatagagcgagatttcgttttaaaaaaaaaaaaaagagtttttttaataaacggtaatggaacgattgtatattttaataggaaaatgttgatatttatttgataatataagtaaaaattaatgatattagattatattatagatttatacgttaaagattatgtaaaatatatatgagaatatagaatatttttaagaatttgaggtaggtagagattttttagtataggaaaagtataaattattaaaatataaaattgattaattgatttaattagaattaaaaatttttttgttaaaaacgttaaaataatgaaacgataggtttagattgggaaaaagatttcgtaattatttatgtaataaaagatttttatttagagtatatatatatttaataaaatatttgtatttagaattgttaaatacgaaggattagatttaaaaacgggtagaagattggaattgaaattttataaaagatgtagaatggttagtaagtataggataaaaacggtgttagtgacgttggtgttaaagcgggaaggaacgtattttttagtttaaaagatttaatagtaggatacggatataattattttcggttaaaaagaatatagagtaatataacgttttggttaacgaaaatttaaagttttaatttatttagtttttttatagcgttcggaaatagagaagtttcgcggtatcggaaaatgcgcggcgtttatagttatatttgacgagatggagggcgtaggcgtatttacggtttttagattgggcgattgattttaaaggggggggtaaatagggaacgcgtaggtataggagcgttggttggaggtttttcgagagttttttagatacgttttcgtgcgtacgttttcgtgcgtacgttttcgttgtcgttattttcggttgattatttttatttagattgtattttcgcggtatttgtttcgattttcgcggggtttagcgtggtattgggaggttcggtttgggggaggagacggcgtttcgttagcggcgttggggtttggttgtagtggtagtgtttttttttttgtttacggggattcgtttaggttggaggttagttaggtgaagagttcgttcgtatgcgtgcgcgttgcgtgggagtcgcgaggttcggggcgggagggggtttcgttttggttttttgcgttgtcgcgacgggtcggcgtgaggtatcgtggcgcggatttcgttttagtttcgttttcgtttttgttttcgttttcgttttcgtttttgttttgatcgttttttttttttttttttttagt

SEQ ID NO: 526 - DNA, 5371 bp, Artificial Sequence
  chemically treated genomic DNA (Homo sapiens)
gttgggagagagggggagaaaagcggttagggtaggggcgagggcgggggcgagggtaggggcgagggcggggttgagacgaagttcgcgttacggtgttttacgtcggttcgtcgcgatagcgtaggaggttaagacgaggttttttttcgtttcgggtttcgcggtttttacgtagcgcgtacgtatgcgggcgagttttttatttggttggtttttagtttgagcgggttttcgtgagtagaagagaaagtattgttattgtagttaaattttaacgtcgttaacggaacgtcgtttttttttttaggtcgggttttttaatgttacgttaaatttcgcgagagtcgggataaatatcgcgagagtatagtttagatgggggtggttaatcgaaggtggcggtagcgggggcgtacgtacgggggcgtacgtacgggggcgtgtttggggagttttcgaggagtttttagttagcgtttttatatttgcgcgttttttgtttgtttttttttttgaagttagtcgtttaatttgaaagtcgtggatgcgtttgcgttttttatttcgttaggtgtggttgtgagcgtcgcgtatttttcgatatcgcgagatttttttgttttcgagcgttgtgaaggaattgagtgaattgaggttttgagttttcgttagttaagacgttgtgttgttttgtgttttttttggtcgggagtggttatgttcgtgttttattgttaggttttttaggttgaagaatgcgttttttttcgttttggtattagcgttattggtatcgtttttgttttgtgtttattgattattttgtattttttgtgaagttttagttttagttttttgttcgtttttaaatttggtttttcgtgtttaatagttttggatataaatgttttgttagatatatgtatgttttgaatgaaaattttttgttatataaatgattgcgaagttttttttttaatttgggtttgtcgttttattgttttgacgtttttggtaaagaagtttttaattttgattaagttaattggttagttttatattttaatggtttgtgttttttttgtgttaggaaatttttgtttattttaagtttttgaagatattttgtgtttttatatatgttttatatagtttttaacgtgtaagtttatgatatgatttaatattattaatttttgtttatgttgttaagtaagtgttaatatttttttattgggatatatagtcgttttattatcgtttgttgaaaagatttttttttttttttttgagacggagtttcgttttgtcgtttaggttggagtgtagtggcgggatttcggtttattgtaagtttcgtttttcgggtttacgttatttttttgttttagttttttaagtagttgggattataggcgttcgttattacgttcggttaattttttgtatttttagtagagacggggttttatcgttttagtcgggatggtttcgattttttgatttcgtgattcgttcgtttcggttttttaaagtgttgggattataggcgtgagttatcgcgttcggtttgaaaagatttttatatattgaattattttcgttttgtgattatatatgtgtgggtttgtttttggatttttgttttaatgatttgtgtttgagtattatattattttataagttttttttttaaattataaaatatatattatatgggcgggcgtggtggtttatgtttgtaattttagtattttgggaggtcgaggtaggcggattacgaggttaggagatcgagattattttggttaatacggtgaaattttttttttattaaaaatataaaaaattagtcgggcgtggtggcggtcgttcgtagttttagttattcgggaggttgaggtagaagaatggcgtgaatttgggaggtagagtttgtagtgagtcgagatcggtttattgtattttagtttgggtgatagagcgagatttcgttttaaataaaaaaaatttatttatagatttatagatttatagatatttagatatttatagatttatagatatatatatatattacgtgaaagttgttattttaattatttttaagtgtatagttcgttggtattaattgtattttatacggttgtataatttttagtattttttattcgtttatagaatattttttattttgtaaaattgaaattttgtattattaaatagtaattttttatttttttttttttttaagtttttggtagttatttttttattttttttttgtaaatttgtttattttagtatttgtttatttatatgtgagtaaaattatgtaatatttgtttttgtaggttaggtgcggtggtttatatttgtaatttttgtattttgggaggttgaggcgggtggattatatgaggttaggagttcgagattagtttggttaatatgatgaaacgtcgtttttattaaaaatataaaaaattagtagggcgtggtggtaggtatttgtaattttagttatttaggaggttgacgtaggagaattatttgaattcgggaggtagagattgtagtgagtcgagattgcgttattgtattttagtttgggtgatagtgcgagattttgttttaaaaaaaaaaaaaaaaaaatttgtttttttgtagttgggtgattttatttagtatgttttttattttatttatgttgtagtatgttagaatttttttttttgaggttgaataatattttattgtatgtgtatattatattttgtttatttatttatatgttagtggatatttagattgtttttattttttggttgttgtaaatagtattgttatgaatgtgggtgtataaatatttttttgaaatttgtttttaattattttggatatatgtttagaaatggaattattggattataagttaattttatttaagatttttttaggaattattatattgttttttatagttgtattattttatatttttattagtagtgtataaagtttttaatttttttatattattattaatatttgttattttttggttttttttattgttattttaatggatgtgaagtggtatattgttttaattaatgtagttttatagtaaatttggaaattgggtttatttagattgggtgtttaattttttggtttatttgggttatattggaagaataattgtttttagttatatataaaatatattaatattaataatagttaatgagtttaaaattgtaataaaattttatattttttgaaagtttatgagtttgtgttgggttgtatttaaagttgttttgggttatatgtggtttttgggtggcgggttggataagtttgatttagattatttttgatttgtttttgtatttatgttatttttttttttttttttttgagataaagtttcgtttcgtcgtttaggttggagtgtagtggtacgattttggtttattgtaatttttgttttttgagattaagcgatttttttgttttagtttttagtgtagttgagattataggtatacgttattatatttggttaatttttttgtatttttagtagagatagggttttattatgttggttaggttggtttcgattttttgattttgtgatttgttcgcgttggttttttaaagtgttgggattataggtatgagttattgtatttagtcgtttatgttatttttttaaagtatagttaaatttttggtatttttatattattatagaagtgttgttttttgttagagtttgtttattttatttttttgagagtttagtgtgtttattagaggagtagtttgtaggttgaattgagaagttagcggttttgggtttgattttgttgataattatagatttgaatagtatgaaatgtatatgtttttttggagatgaaatagtttgataaagttaatttttatatatggatttatgaaaggaaaggatggagattattatttagttttgtaattatcgtgtttaggatattaggttttaatgtaaataggttttagagtttaggaatgaaatatttaatttgggatatatttaaataattttaaatttagaatttatttttattttgatattttagtaatttttttttttttgttattggttatgtgatttgagataaattattttgatttttttgaagtttattttttttatttgtaaaataaatgagataaaatattttttttttaaggttttgttttttttaaagattattttattttgttttgtgatttgaaattatattttagatgattcgaagataaaagtatgtaatttggtttgtgattaaggtgaagaaatttttgggataaggtaggtttagggttagtattaattaaaatgattgatattttttttattttttttaagagtggtagaaagttggtatttaaagagtttataaatttaggtttaatttgtttatgatttattatgaagaagaattattggtagtacgaatttttaggtaatgattttggggtttagttttttagagtgtgattatgttagtaattagaattttaggggataggattttggaaaattattaggaatgttagtggggaaatagataaaataattttttagaaaatagaaatgatcggttgggcgcggtggtttacgtttgtaattttagtattttaggaggttgaggtaggtggattatttgaggtcgtgagtacgagattagtttgattaatatggagaaatttcgtttttattaaaaatattaaaattagttaggtatggtgttatatgtttgtaattttagttatttgggaggttgaggtaggagaattatttgaatttaggaggtagaggttgtagtgagttaaaattgtattattgtatttcgatagagcgagatttcgttttaaaaaaaaataaaaataaaaataaaataaaataaaattaaaaaaaagaagaaaaagaaaaaagaaagagttagagtttttagtatattagtgttaatatagattaatatgtgtttagtttttaattacgttattttagttttataattttaggaggtagatgttatttttattatttttattttagaggtgaggaaatagagtttttagaggttaagggatagagttgggatttaaaatgagttatttttttattatttatatgtattttatagttgttttaggttgtaatttttgattttaaaaaaaggagtagggatttgggtttttaattttggatatatttataagaatttttttgttttattttttagataaatttttaagagtgaaagttttttatagaatatagttaataaagttagaaagaatgata

SEQ ID NO: 527 - DNA, 8237 bp, Artificial Sequence
  chemically treated genomic DNA (Homo sapiens)
tatttgaattatttgtttttggttatttgaatggtttaagaaatgttagggattagagatttttttttgtatatatatgtattattagaaattgatattaggtttggtgtgtagtgattattatttgataattttattttaatagaatgaatgaataaattggatgaatttttatttttagaaaatttagtagagaaaattttttatttatgtatattcgggtttatgtattaaaatggttttagtatgaatttggatataagattattgattttatattaagttgttttgttaaatttatttagtagtttttatagtttttagattttttaggattttaaagttatatatataattatgttatttgtaaataaagatagtttatttttttttttcgaatgttagtaatttattattgataggttatttagtttattttgtttattgttgtagagaatataaattaaattttagaataatttttttaaatgtttagaaattttttatgatttttatgttaggataatgtttaaaaagatttaaaattagtgttgtttaaataaaatagaaatgtatttatttttttgaaagtttttgattagtgtagagagtgagagagtatttggattttattaagaatattattttttaggttgttagttttgtttgtatgattaaagtttgtttttgatgatttttttttattttgtaagaagtaggaaaaagagaaagtttagattaagtaattttttgttagaaaaatgaatgtgagttgtttatattatttttatttttattttattagagagaatatagttgtatggttataattatttgaaggagaaggtgggaaatataatttttagttgggtagttagaaaaagttagaaaagattgggattaatgattattttgttataatttttaaaagtaaatttaataatatttttattgatttaatagttatatttttgagtaaatttgtagaaaataaaaaagttatattattttttaatatgtgaaaatgtttgaatagaatgggtaggagtagtttttaagttttattttttagtttatgtgagaggaggggagttattttatatttagagtatattaatttagtattgtgagtaatattaaggtaataaagaataagtttatatttatggtttttttttggcgtgttttagttttttttaggttgttgttggaggaaatgaaatatattaaagatgtggaaaggtggaggggtgttattaggtgtagatattttggttatagggtaaagtgatagttaatgggtaggtatggagataaagtataaaagtattatagtttaggataatttagtatagggaaaatgtttttaaatttgtttgagtgttttttaaggtattattgtattgttgttaagtataaaattgatgtttatgaggttgaattttgtgaaaattatttttagaagaggtttttaggatttaatattgtatatgttttttttatgtttttttatttttcgtattttttatatattaaaaattaattttggaataatttttattttaattaaatgagatttaagtgaatattaagaaaatatttttaatagaagggaaattttaaaggaggaatttataaataaatgggatgattgtagtgtgtgattaataaggaaggttaagtggattaatatttatagaatggagtatgtagtatagtttataaaaatttatttaataggttaggtatggtggtttatatttggaattttagttattcgggaggttgaggtaggagaattgtttgaatttaggaggtagaggttgtaatgagtttatattacgttattgtattttagtttgggtgataagaatgaaattttattttaaaaaaaaaaaaagaataagtggatattaattaatttaagaattttatttgttattattattatgagattaatataaagtaggaaaatgatagtgtatatagtttaaaaggtaatgattagaaaataatttatattttatttaaaaatatgtatttttgggtatatttgtatttgatttggatatttttaatagtttaaagaaataataaagtaatattgtagaggttttatttggaaaatttataaagtttgtagttttttcgttgttggttttagtagagttaagaattaatagaattttgtttaatgtttaattttatatacgattttttgtgtgtttattgtgtattgattttaagtagtaaaatgtatttttagttagttttagttttaaaaggggaatttgttataaagatatagagtaagaagttgggtttaaaaaatagagtaattaagatttagaaagttattagaaatttttttttttgcgtggttgttttatatttatggatttttttattttgaaggattttttttatttttttagattatgggtagaaatgtatatattattggtttacgtagatagataaatttgtaatttttgaattataattttaaatttttaggagaagaaaatatattggttcgggttgtttaagttttaatttttaattttattagttgtggttgatgtgggaagataatatatataattagagttaaaaggaaaatagttcgatagaaagagaagtagtttttagaaaagggggattatttagagatgagtagatagtttcgaaattgtttttatatatttagttttgtgaaataagtattgtagaaagaaaatagatgtttataattttagttttaaaaaagttataattttataaatttatgtatatatgtagagtaaaggagtaaaatttagtataatgattataaattaagtgatggttttgattaaaagggagttggatgtagtggaaatatgacggaatttaaaatgtaaagatatgggtttaaattttggttttggtttttagtttttatagatttttggatgggttatatattttttatttgtgggtttttatttttttatttgtaaatgtggatgattatatttaattttaagatattttgtgagaattaaatgtagtatttattaaatgagtagtagatagtagaatttagtttataattatgtggtttattgaatatgttttttttttttttttttttttttttttttttgagattgagttttgtttttgttgtttaagttggtgtgcggtggcgtgattttagtttattgtaatttttgttttttaggtttaagtgatttttttgttttagtttttcgagtaattggaattataggcgtttgttattatattcggttaattttttgtatttttagtagagagggagttttattatgttggttaggttggttttaaatttttgattttaggtgatttgtttattttagttttttaaagtgttgggattgtaggggtgagttattgtattcggcgtgagtatgttttaaatatataatattggtgaaataattgggttgtatgttggtaatagattaatatataggtgttggttgtttttagggaaattatagtttgttgggggtgtgagatagatgaagagatattttagtaaaacgtagtataattgtttattataattttagatgtgattggaatttgatttggaaaggttttagggaggtgttaggatatgagcgaagttttatgttggtgggtaagattttatatcgatatatttcgtatgaaagtggggtaaagttttgggttgagttgatttagttttgtaatggtgatggtttatatttttattgtgggaaggaaataaaattagtaatttaaaagattttttttaaatatgtttattttaaaggaaggatttaaggaaaatattaatatattttttaagtagatttttaaaataataaaggaagttagaaaatttagtgttaataatttatttgtaggtaattgagagtatgttttttgtgtttagagaaaatgaaattatttaagaaatgtatatttgatataatggtataagtatataaaatgtatgttataagttaatattaggtaaattttaaagttatttttgttagatttaattggaaagtagaagaaataaatgatattagtatgtgaatattttaaagttgttgttttaatatattagttaaagtttgttagagttatttattattttaggataatttgtttattttatttagaaattagaaatgtgttttggttaatatatttaaatttattttgtggtagttattttgtttaatggaagtgttttttagatgttgtttaagtttagtcgtttgggtttttttttaataaatgaggaaagtttgattttataggttgttattgttgattttgtttaatttttggattaattggtttattttattgtatttgtattgatatataagatttttaggacgtgggataaatttatttattttttacgggtaagtgttaaagttaatttgttttatagaattaaatgtgtttttattagaggtgtttgaaaaaaaatgtgtaaagatagtagttggaaatttttgaaaaggattatgtttatgtaatatatttgttggaagtttttgaatttatattgagaattaagaaaaagttggaatagtaattttatgatgtttattaaattatatttttgtgatataggttattattttttttaagataaaattttaattttgtattgttaagtatatgttatattttggttagagttttaagataagtttattttatattggagattttttaagaattaaaattgttaataacgtggttgagggtgatttgatttgttttgtataagattaagtttaatggttaaatattttttataaaattaaagttgatttaaagttttgttttaagaatgggatggttttattattgttatatttttaaagttattgaaatgtgtataatgtaagtttaagttagtggtgagatgaaagagttgttttttgatatttttattttatttttagtaagggtatttacggtatttgaaaataacgatggtatggaaaatattttttatttatttgttgttgttgttgtttgttttcgtgatttagtaagttttattttaaggtagtttaattatcgaatatatttttatttaataattattgttaattatttagttttgatttttataataacggaaatatatttttaaaaatttatatttgtttgagtttaatatattgtataattttaaaataatatataatatgtagtttgtttgtaagtgttttggaatttttatttttttttttttttgagagttttgagtttgtataaagaataattttggtatttgttatttttatggttttttcgaaagtttaaaaagtgtagatagtttattataaaattatgttggagttatatagtattataaaaataattaaaaaagaataatatttagataatatgtaatttttgtttatatgttgaataatttgttttttaaaattaaataaattattgataaataatttattttggtattatttagatatagatattatattataataaattatagtgttttaaatggtattttattagttttgaaaatgtttttttttttttataagaattatttatttaggtatggatatatatagatgtgattgttattttgtgttataatattaaattttttatagtttttttaaaataggttttggatgaatagtttttgttatttatttttagagattgttaaagtatatttagtgaaattatattagtaaaagatgttagtatgttatttagggggattaatagtaataatgttaagttttggattttttttttttttttttttttttttgtttttttttgataagtaaaatttgagagaataaaaattaagatttatgatagttatgatgaaattatgtttttaaagtaaatatttttagtaaaatacgagatttttatgaaatttgaatatgagtggtaattgtttgtataggtataagttgtagaattgtttagataagaaaagataggaaaatatatgaaagtaaatgtgaatatttaataagaatgatgattattttagtatttttagatttttcggttttttcgtaatattatgataaggtttataatattgggggtattttttaaattgtttttttttttgtgatataattggttgtttattaaaatagtgttatttttattttaattgtgattaaataaattaaattaaaattaatggggttgggtgtggtggtttatatttgtaattttagtattttgggaggtttagggagatagattatttgaggtttggagtttaagagtagtttgggtaatatggtaaaattttgtttttatataaaatataaaaaaattagttaggtgtggtagtgtgtgtttgtaattttagttattcggaggttgaggtaagaggatattttgaatttaggaggtggaggttgtattaagttgagtttgtattatggtattttagtttgggtaatagagtgagattttgttttaaaaataaataaataaataaataaaattaatggttataattaatagtaataaaagtaggatagatatttaatttatgaaagtaagttttttttgtaaggatgattttttttttttttttttttttttgagatagggttttgttttgttttttagtttggagtgtagtggtataattttggtttattgtaatttttatttacggggtttaagcgatttttttgttttagtttttcgagtagttgggattataggtttttgttattatgttcggttaatttttgtatttttagtaaagataggtttttattatgttggttaggttggttttatttgattttaggtgattcgttcgttttagttttttaaagtgttggaattatagatgattttttattttagaaatttgttaattataaaagagtaattttttgatattgttttgtttgttttttttgtttttttaatttttttttatttttttttttttttatatataatatatgtatttatatatatatattatatatatatttttgtatgtattatgtatttatgtacgtaaaaagttttgaaagttgttttataatttattgttttatttgtatatttagattttggtatttttggattttatttttttaagatttgtttttagtgtgttttaatatttttttgtggatttaggatagtatatttgttaatttttattttagggatggattttattgttatatttttgtagttattttttagggagggttttaaggtggtgttttttaaatgatttttaaaaaatatttgagaatgagtatgtttttgttattgtttgtttatttgttgtttggaaaatttttgtttatgatttttatagttatgtttagttattttaagggtttttattttagtagtggttgtaagtatttgttttttttgatattttaaaaatttagttatttttattaattaaggaagaaaaagtttagtaaagtttatgttggtgtaattagcgtgttttaaatttatttttaggaatgggaggtaaagcgataggtggaaatattttaggtttaaaataagatatattagagtttaaattttggatggattgtttatttaaggtgattataaaatgtattatttaaattaggataattataagggtaaaagagtttattataaataattgggaggtattaattaatttatgatgttaatatattggaattattaattagtcgtgtgataatgagtaagttgttaaaatttttgtgttttagtttttttagttttaaaaaagggttattaaattttggaaatatttttataagtattagtgataatgtatgatttagtatttggtatagagaagtttaataaatggtaattgttaattattaaaattatagatcggtagtagttgtagttgttattttttttttaggagtattattttttttaggtaaagttattattttgtttggtttttaaaaatgtgtttattattttagtttagtgaagaataaagtgatataattgagattatttaagatattagttaaatattagttgggtttattgttgatattattttaatattttttcgattaataaaatttttttttattaagtggttttgtttttttcgttagattgttttttttttataaagtggtttggttatatttacgttagtattgtataattttaga

SEQ ID NO: 528 - DNA, 8237 bp, Artificial Sequence
  chemically treated genomic DNA (Homo sapiens)
tttaaaattatataatattggcgtaaatatggttaaattattttatagaaagggagtaatttaacgagggggataaagttatttggtgagagagaattttattgatcgagaaggtgttggaatgatgttagtaataggtttagttgatatttggttgatgttttaggtgattttaattatgttattttattttttattagattgagatgataaatatatttttgaaaattaggtaaagtaatggttttgtttaaagagggtgatatttttaaggaagaggtggtagttatagttattatcgatttgtggttttgatgattagtagttgttatttattgagtttttttatgttaggtgttgagttatatattattattaatgtttatgaaaatgtttttaggatttagtagtttttttttagagttaagaaagttgaaatatagaaattttgataatttgtttattattatacgattagttaatagttttagtatattggtattataggttaattaatattttttaattatttgtagtgaatttttttatttttataattgttttaatttagataatatattttatggttattttaagtaaataatttatttagaatttgaattttgatatattttattttaagtttgagatgtttttatttgtcgttttgttttttatttttgaggataagtttaaagtacgttggttgtattagtataaattttattgagtttttttttttttaattggtggggataattggatttttaaaatgttaggggaggtagatgtttataattattgttgaagtgagaatttttaaaataattgggtataattataaaggttatgaatagaggttttttaggtaataaataagtaaataataataaaagtatatttatttttaaatattttttaaaagttatttggaaaatattattttaaaattttttttgagaaatgattgtagaaatgtgataatggaatttatttttggaatagaaattggtaggtgtattgttttaaatttataaaggaatgttgaaatatattgaaaataaattttaaaagaatagagtttaggaatgttaaagtttgaatatgtaaataaaatagtaaattgtaggataatttttagaattttttgcgtatatgagtgtataatgtatataaaaatgtatatatagtgtatgtatataaatatatatattatatataaagaaaaaagagaatgagaagaggttgagaaagtaagagaagtagataagatagtattaagagattgtttttttatagttggtagatttttgaaataagaaattatttgtaattttagtattttgggaggttgaggcgggcggattatttgaggttaggtgagattagtttggttaatatggtgaaaatttgtttttattaaaaatataaaaattaatcgggtatggtggtaggggtttgtaattttagttattcgggaggttgagataggagaatcgtttgaatttcgtaggtggaggttgtagtgagttaagattgtgttattgtattttagattgggagataaagtaagattttgttttaaaagaaaaaaaaaaaagaggaaattatttttataggaaaagtttatttttatagattaggtgtttgttttatttttattgttattaattgtaattattaattttatttatttatttatttatttttgagatagagttttattttgttgtttaggttggagtgttatgatgtaagtttagtttaatgtaatttttattttttggatttaagatatttttttgttttagttttcgaatagttgggattataggtatatattattatatttggttaatttttttgtattttgtatagagataagattttgttatgttgtttaggttgtttttgaattttagattttaggtgatttgtttttttaggttttttagaatgttgggattataggtgtgagttattatatttagttttattaattttaatttgatttatttaattataattaaaatgaaagtaatattgttttagtgaataattaattgtattatagaggaaaaggtagtttagaaagtgtttttagtgttgtgaattttgttatagtgttacgagaaagtcgaagggtttggagatattggagtagttattatttttattgaatatttatatttgtttttatgtgtttttttgtttttttttatttaaataattttgtaatttatgtttatgtagatagttattatttatgtttaggttttataagaatttcgtattttattggaaatgtttattttagaaatataattttattataattgttatgaattttgatttttatttttttagattttgtttattaaaggggaataaaaggaaaagaaaagaaaagaaaaatttaaagtttggtattgttattattaatttttttagatggtatgttagtattttttattaatgtgattttattgaatgtattttaatagtttttaaaaatgagtaataagaattatttatttaggatttgttttgggagaattgtgaaaagtttaatgttataatataaaatgatagttatatttgtatatgtttatatttggataaatagtttttgtaagaaaaagagaatatttttaagattaataaaatgttatttgaaatattatagtttattataatatggtatttatgtttaaatgatgttaaaataagttatttattaataatttatttgattttaaaaaataaattgtttaatatataggtaaaaattatatgttatttaaatattgtttttttttagttatttttatgatattatatagttttagtataattttatgatgaattgtttgtattttttaaattttcgagagaattatagaaataataagtattaaaattattttttatataagtttaaaatttttaaaaggagaaaaagatgagaattttaaagtatttataaataggttatatgttatatattattttaaggttgtatagtatattaaatttaagtaaatataaatttttagaaatatattttcgttgttataaaaattaagattgaatgattagtaatagttgttaaataaaagtatgttcgatggttaagttattttgagatgaaatttgttgaattacgaaaatagatagtagtaataataggtaaatgggaagtgttttttatgttatcgttgtttttaggtatcgtaggtatttttgttgaaaataaaataaaagtattagaaaatagtttttttattttattattaatttaggtttgtattatatatattttagtaattttaaaaatgtaataataataaaattattttatttttgaaataagattttaaattagttttaattttatagaaaatatttggttattagatttaattttatgtagaataaattaagttatttttagttacgttattgatagttttaatttttaagaaatttttaatatagaatagatttattttaaaattttagttaaagtatggtatgtatttaatagtgtaaggttaaaattttattttaaggaaaataataatttgtgttatagaaatgtaatttaataagtattatggagttattgttttaatttttttttaatttttaatataaatttaaaggtttttaataggtgtattgtataaatataattttttttaaaaatttttaattattatttttatatatttttttttaaatatttttaatgaaaatatatttaattttatgaagtaagttaattttgatatttattcgtaaaggatagatgagtttattttacgttttgggagttttatatattagtgtaaatatagtgggatgaattaattagtttaaaggttagataaaattaatagtgataatttatgaaattaaattttttttatttattggaaaagggtttagacgattagatttaggtaatatttggaaaatatttttattaagtaaaatgattattataaaataaatttagatgtattggttagagtatatttttaatttttaagtgaagtgaataaattgttttgagatggtaaatagttttggtagattttgattagtatattgaagtagtaattttaaaatatttatatattggtattatttattttttttgttttttagttaaatttagtaaaggtagttttgaaatttatttagtgttagtttgtggtatatattttatatatttatattattatattaaatatatattttttgagtagttttattttttttgagtatagaaaatatgtttttagttatttataggtagattattgatattggattttttagttttttttattattttaaaaatttgtttaaaaaatgtattgatattttttttagattttttttttaagataagtatgtttggaaaaggttttttaaattattaattttgttttttttttataatgaaaatgtgaattattattattgtagagttaagttagtttagtttaaggttttattttatttttatacggaatgtatcggtgtaaaattttatttattaatataaggtttcgtttatgttttagtatttttttgaaatttttttagattaaattttaattatatttagaattatagtaaataattgtattacgttttattaaaatatttttttatttgttttatatttttaatagattatgatttttttaaggataattaatatttatatgttagtttattgttaatatatagtttagttgttttattaatgttatatgtttaaaatatgtttacgtcgggtgtagtggtttatttttgtaattttagtattttgggaggttgaggtgggtagattatttgaggttaggagtttgagattagtttgattaatatggtgaaattttttttttattaaaaatataaaaaattagtcgggtgtggtggtaggcgtttgtaattttagttattcgggaggttaaggtaggagaattatttgaatttgagaggtagaggttgtagtgagttgagattacgttatcgtatattagtttgggtaataagagtaaaatttagttttaaaaaaaaaaaaagaaaagaaaaaaaagaaaatatgtttagtgaattatatggttgtaggttggattttgttgtttattatttatttggtaggtattgtatttaatttttataaaatgttttaaagttaaatataattatttatatttataaataagaagatgaagatttataaatgaagaatgtgtgatttatttaaggatttataaagattagaggttagaattaagatttgaatttatgtttttgtattttaagtttcgttatgtttttattatatttagtttttttttgattaaaattattatttaatttgtaattattatattaaattttatttttttattttatatgtatatataggtttgtgagattgtgatttttttaagattagaattataagtatttattttttttttatagtgtttattttataggattaaatatgtaaagataatttcgaggttatttgtttatttttaaataattttttttttttgggaattatttttttttttatcgggttattttttttttagttttggttatatatgttatttttttatattagttatagttgataggattaggaattggaatttgaataattcgagttaatatgttttttttttttggaaatttgaaattatagtttagagattataaatttgtttgtttacgtagattaataatgtgtatatttttgtttatggtttaaaggagtagagaaagttttttagagtaaaaagatttataaatatgaagtaattacgtagagagagaaatttttgataattttttaagttttggttattttgttttttagatttaattttttgttttgtatttttatggtaagttttttttttggagttgaagttggttaaagatgtattttgttatttgaaattaatatataatagatatataaaagatcgtgtatggagttgaatattagatagaattttgttaatttttagttttattgaggttaatagcggggaagttataagttttgtaagttttttaagtaagatttttatagtgttgttttattatttttttggattattgggaatgtttaaattagatataaatatatttagagatatatatttttaaataagatataaattgttttttaattattgttttttgaattatatgtattattatttttttattttgtattaattttataatggtgatggtaaataaaatttttgaattgattaatatttatttgttttttttttttttttgagatggagttttatttttgttatttaggttggaatgtagtggcgtgatatgggtttattgtaatttttgttttttgggtttaagtaatttttttgttttagtttttcgagtagttgggattttaggtgtgagttattatgtttggtttattaaatagatttttataaattgtgttgtatattttattttgtgaatattgatttatttaattttttttgttgattatatattgtaattattttatttgtttataggttttttttttaagattttttttttgttaaaggtatttttttaatgtttatttaaattttatttaattgggataaaagttattttagaattggtttttgatgtgtgggaaatgcggagagtaaagagatatggagaggatatatataatattgaattttagagattttttttagggatgatttttatagggtttaattttatgaatattagttttatgtttggtagtagtatagtgatgttttagagaatatttaagtaagtttagggatattttttttgtgttagattattttagattgtggtgtttttatattttgtttttatgtttgtttattagttgttattttgttttgtagttagagtgtttgtatttagtggtatttttttatttttttatatttttgatatgttttattttttttagtagtagtttaggaaaaattgaagtacgttaggggaaaattatagatgtgagtttgttttttattgttttaatgttgtttataatgttaagttagtgtgttttagatgtgaaataatttttttttttttatatgaattagagagtaggatttagggattatttttgtttattttgtttaggtatttttatatattagaaagtaatgtggtttttttattttttgtaggtttgtttaaaagtatgattattagattagtgaaagtattattagatttgtttttggagattgtggtaggatgattattgattttaattttttttaattttttttagttgtttagttagagattatattttttatttttttttttaggtagttgtgattatataattgtgttttttttggtaaaataggaatagaagtaatatgggtaatttatatttatttttttaataggaaattgtttggtttggatttttttttttttttgttttttgtagaatggaaaggggttattagagataagttttgattatgtagataaggttagtagtttagggaatagtatttttggtggaatttagatgtttttttattttttgtattagttagaaatttttagaaaaataaatatatttttattttatttgaataatattaattttaggtttttttagatattattttaatatagagattataggaaatttttaaatatttaaaggaattattttaaaatttgatttgtattttttgtaataataaataaaatgagttaaatgatttattagtaataaattattggtattcgagagggagaggtaaattatttttatttgtagatgatataattgtgtatgtagttttaaaattttaaagaatttaaaagttgtaaaaattattgagtgaatttagtaagatagtttgatataagattaataattttatatttagatttatattaaggttattttaatgtataaattcggatgtgtatgaataaagaattttttttattgaattttttaagaataaaagtttatttaatttgtttatttattttattgaggtgaaattattaaatagtggttattatatattaaatttagtattaatttttagtgatatatatatgtgtaagaaagaatttttggtttttagtattttttggattatttaggtagttagaaataaatagtttaaatg

SEQ ID NO: 529 - DNA, 7403 bp, Artificial Sequence
  chemically treated genomic DNA (Homo sapiens)
ataaggtttttttaatagtttgaatttttatatttttatatattatttaaaagtttagtattatatttgtttgaattattgttggatattagagtattttattaaagaattaatttttatttatatgtttatttttttttaggttaattttaatggtaaaaagtttttttaaaaaaattatttttttggttatattgataagatatgaatgaataaataagaaaaaaaaattaagtagatatgttatagttaagatattttagataaattttaataaaaatgtattggaggataaagggtacgtaggttggatttgaagggtagtattttttttgaagagtttgttttattttttagtttgaatttttttaatataggtaaaaaaattggtagtgggggaagttaggggtaatagtgtgttagtatatgtatggttttaagagttgttataatattaaaatatttagtatagatttatttttttgattttttaagtgttttgatttttttagatttttttagttttttatataggttaatttttatagttttattattatgaaataataaaaatattaatgtttattattttagggggttttaggtattttgatttatcgttatagttttttgttttatttgatggtgtttgtgttaattagaattttaaattataaaatttaaaattatttcgggaagtaagtatggttgagagttttattttttattagataataataagagatgattaatagataggtaatagataagtagatagatagattaattgatttttagttagaagtaggtatgttttagttttattttttattagataagaaatgtgtgtgtttgtgtatatggatagaatattgaagtgtgaggaattttttataaggaaagttattatttattttatttttgattagtatatagttaaatatttaatttttttgtttaaagaaaatataatttttaaagagtgagatttacgtttgtggagattttggatatgttatttttaaatttggtattattttatattaggtattaaaatgtgtataaaggtatatatgatttagaataagtacgtgatatataatttatagagattttatagaattagattagaggatatgaatagtatagtagtaattaaaagaaaaaaataagaattataggggaaatttttaaatgtttttattatggtttttttatttaaggagtaaatgtttttaaggtattgataatagattaagaatttgtatttattgagggaaattgatgatttttaaagttttagtaaaaataaatattgaatatgaatatttttaaaaaaataaaagtatgttttattattgttaaaagaaaaaattttagataaattaattttagtagagtttaaacgagtaaagagataattaatgaatgaggtagtattttaaacgagtaatggtttagagagttttattttgtaaagtgggtaggtagtatttatagatagaaaaataaaatgataaatagaaatagtgttattgattatagttttttttttgttttatttggatatttgagtagtttgtagtttgtaattggttgaaagtttagttgttaagattggttaagatttagttatttgttataagaatatatttttaatttaggttgtagtttgtttatatattaagttagattgtagtttattgaaaatggggtagtattaggttaaatttaatttaataatatgtatgaagttaatttaaatagtaggatgtaattaagttattgtattttgtttattttaaaaatagtgttatttaaaaaaaattattattgattttttttttaatgtgttttttatattgtttaatattttatattgaaaatagtatacgttttatttaattttttagttattagaagacgattatttagaattttttaatttatagataatatttttttaattattttatattttattttatttaagataatttattattaatataaattgaaatatttttgtgatatatttattttgaggatttttttaatttttaattttttttattttttaatattttttagtatattttgtagtagatattttttaggttatgtgaagaaatttttttttgtttttttgagatggagtttttttttgttatttaggttggagtgtagtggcgtgaatttggtttattgtaatttttgttttttgggtttaagcgatttttttgttttagttttttgagtagttgggattataggcgtttgttattacgtttagttaatttttgtatttttagtagatatagggttttattatattgattagattggtgtcgaatttttgattttttgatttttttgttttagttttttaaagtgttgggattataggcgtgagttattgcgttcgttttgtgaaggattttaaatatattttgttttatacgtgatagaagaaaaaataaaattattttaaatttaaaaatagataaataaaagaaaatataaattttgttttaaattaggaataaaaattaatttgatgttatttaatgttaaaaattagcgttttttagaaaagatggtaattttgtttattagttttaggtattaaatatagtatgggaattttagtattatttgagttatttatttagttatttgatataaattaattattattttttagttgtattataagtttttagattaaaaatggtaaataaatgaagttttgtaaagttttaaaatgtataattttatttttattgaatttttttattgttttaaattaagggtatagtttgataaagagaaagtttggtaagaaagtatatataaaaattaaggtgaaagggggtaatatgtatagtagttagaagaattaggataattatgatttttgtataatatatgtttttgtattatttatatattttaatattttatttataggaaatgtggggttatggagtagtaaggagatatataataaattttatagagaaatttgtatttttttgtagttaaataaatcgattgatagattttgaataaatatagtttaggtttttttagattgtttttattttggttatttaagaatgttgtaatatttttaaattttaagattaagttgttattgttagtttttataatagatttttttatttttaagtttatgggagaggaggagaatataggataatgttaatttttttgttatatagttttgtttttttaataatttagattttttttatttagggaaaaaatgaatatttaatgtgagtatatggaattttgatttagtttttagattgagagagtttatgaattattatatttgatgtttatgatttaaaatgtaggattgttttaaattaaggtaattaggaagatagttttttagagacgttagtttttgttaagatttttaggtttttataagagtatttagttagataattgttaaagtatatatgtggttttaggaattaaggaaaaagtaaatgttataggaagattattttttaaattattttatttattagtttattgtaagagatagtaaatttgaaattaaaggttataggttgttttagatgtatggatttaaaaattagagaaagttattaataaaatttagtttttatttattatagttattttatttaggaaatttttaaaaggtgaatggaatttttaagtttatgaaagatgaatttttgttattttggttttagagtggtttagggttagagaaggtagagagattataagttaataatagtttatatattgttatttttgaaaagagtggaaattattggttagaattttagtttattatatggtatattagaatgatgggtgtaagtgtgtttgtgtgtgtgtatatatatgtgtgtttgttttggaaaattattgtattatttttttaaaataaatttttaaattaggggttatagtttgtttgttttagaagtgggtttataggatgtttataagagaatttattttttagttttttttatatgatttttgatttttcgtgaagtaataattgtttttttatttaatttaattatagaattattaggttggtgcgtaagtgattgtagtttttattatttaaaagtaaagtttaaaattttaattatttttgtattgaattattttttttatattttttatttttagtttttttaagtttttgtttttttatttgtaaattggagagaataatattatttaatatatatgttaaaattaaaagaaataaatagatgaagatgtatatttaaagtattatatagatacgttatttttaaaaagataaaatatatgtatttttaaaaagataaaataaaatgtgtattttaaaaagataaaataaaatgtaaaaagtaataaaatgaaggaaatttaatgatagtgtaataggggattgaaaattttgattttttaatttttattttatattttttggtatttagtgtaaaaattttaaaatttttatttagtaattttgaggaagaaatttgataattgataatatatgagattgttatttaagtgaaatataattttatatatttaataaattttagagaaataagataaattttaaagtaaatgatttttgtagttttatagattttttaaattaatttagttttagattttatttttattattttttttatttttttttggtttaattaattaaaattttttttagaatgtttatttttggttagtatgtttttttgaatatgaataagaaataaaatattatttgatgtttgaaattatgggggtaattttaatgacggaaatagatgattaggaaaagggaaacgaatgtttgatttattatatttatgaagatattaaaggtttataaagttaatatttgggaaagagaaaatcgtgagatttttagattttttttggtgaagtgtgttttttgtaacgattacgaatatgaatattaaaggatcgttatggaaaggtatgtgtgataatttattgcgttgttggttgtattaatatttttgtggggggattaatgtgaaattttaattaataataagagtttgtaggtttataaggtttagaagtataattttatgttttttttagaaagtaattttataagggtattatagaatagaataatggtttttaaataggggaatttttttttagaggtatttggtaatgtcgggagatgttttgggttgttttaattgaggtggggaagtgagggaaaagtgttattggtatttaatggatagtgatgagagatgttattgaatattttttaatgtacgggatagtttttagaataaggaattatttaatttaaaatgttaataatattaagattgagaaattttggattagaataagatttaaagagtttgtgggtttaatttgttataatttttaaagggataaagtaatattttttggttattaggtttttaatgtggattggttaatttgaattaatttgatgaaatttttaattgtgaagttataaaatagatattaataatagaattgttttttttattttttgttaatttggtttaagttaaatgatattttaaaaggaaaaatagattgtttagtaataattaattatttttatttttttggttgatatttgtaaggaaaataaattagtaataattataaaatgtgtttttaattaaatgaagaataaaaatatgtgtttattttatttcgttttgggttttaaaaattttttttatgttaaatgtgtagataaatgtatttagagttatagaatatttatttagttgtgaattttttagatttgttattttaatttttttatttataaagtatattttatttatatatatagataaaatatatatttggtttcgttatatgattatagtatgtataaaataaattttttggaagaattatgtttttgaaaaattaaaagtttataataggaattattttaaataaaaattttattttataattaatagatttagttattttttatattaagtaattttttaggtatttttaagtgtttaggtttaggtatttttttataaattaaattttagtatttgtttagttttattttgggtatttttgattgtattttttaaaggttttgaaggatttaagttttgtgataaatatagttttatattgggtatttttttggggtaatgttattgaagttaataagtgattttaatttggtagttatttatcgtttttttttttttgaaagtataaattattgatatatataggattgtaattgtttatttgttgagatagtaaattgatgataaagttttgaaaatttttagtaaagattagagtgttttgtaattagagtaggaaaagtggagaaaattaagttttttggggtttttgttgtgatgtaattaattaaaggtaaagaatttgttattttttaaaagtgatagtaataatttatgtaaatattgagttattacggttatttatgcggtttttattatatagatgtagattgatagtttataggtgtacgcgatgtgataagacgacgtgtaaagattatagtattggtattatgttttttttatttattaatgatacgatttggggaaaattatttaatttttttaagttatttgttttattagtataatttgatgataattataaaggtttagtgtattttataaggttattatgaagtttaaatataaaaaaaatttaatgtttttggcgaagtgttaaatatatgtatgggattattacgagttagtagatttaaattatagtattatttttatgttagaattttttttaaatttagtattagtaattaaataatcgtgtgtttatttttattaggtaggatgataaatcgaaaggatcgattgtattgtttttgttatattagtgtttataatgtaaattattagatatatttagttaaaaaaaaaattataaagtgttgggtagtttgattgttgaaaatttgtagaaatttttaagatattaaattattttaagagaatgatttaaatattttagtttagaattaatttaagttttaaatgtttggaaagtatagaagtatttttgggaaacgtataaaaatgtaggaggtaatttattttttaaattatatatttgtgtaaatataattatatatttatatttatatagtggaaggcgtttgttttttttttattttagttattatagtagtaaattaggtagttgagggtagtggggagtaataaggtttttttcggtaggattatttttgaaaattttcgtggaataaattattttagagtggttcgcgtttttatttaagtagg

SEQ ID NO: 530 - DNA, 7403 bp, Artificial Sequence
  chemically treated genomic DNA (Homo sapiens)
tttgtttaaataagaacgcgagttattttgagatgatttattttacggaggtttttagaagtaattttgtcgaggaaagttttattgttttttattgtttttagttgtttgatttgttattgtaatggttgggatgggggaagaataaacgttttttattgtgtaaatgtagatatataattatgtttgtatagatatatagtttgagaagtgggttattttttgtatttttgtacgttttttagaagtgtttttgtattttttaaatatttggagtttaaattaattttgagttagggtgtttggattatttttttaagatagtttaatgttttgggagtttttgtagatttttagtagttaggttgtttagtattttgtaattttttttttaattaggtgtgtttgataatttatattgtagatattgatataataaaaatagtatagtcgattttttcgatttattattttgtttgataagaataaatatacgattgtttgattgttaatattgagtttgaaaagaattttaatataaaaataatgttgtagtttagatttgttaattcgtaatagttttatgtatgtgtttgatatttcgttaaaaatattaaattttttttatatttgagttttataataattttgtgagatatattgggtttttgtaattattattaaattatattgatgaaatagatggtttagggaggttaagtgattttttttaagtcgtattattagtgggtgagagaggtatgatgttaatattgtggtttttgtacgtcgttttgttatatcgcgtatatttgtgggttgttaatttgtatttgtgtaatgggggtcgtatgagtagtcgtgatggtttagtgtttatataggttgttgttgttatttttaaagaataataagttttttgtttttgattgattatattataatagaggttttagaaagtttgattttttttattttttttgttttaattataaaatattttgatttttgttgaaggtttttaaagttttgttattaatttgttattttagtaaatggatagttatagttttatatatattaataatttatatttttaaaaggaaagaaacgatagatagttattaaattaaaattatttgttaattttagtggtattattttaaaagaatgtttaatataaaattgtgtttattataaaatttaagttttttaaaatttttaagaaatgtaattagaaatgtttaagataaaattaggtaaatgttaaagtttagtttgtgaaaaagtatttaaatttaaatatttaaaaatatttaaaaaattgtttagtgtaggaagtgattaaatttgttagttgtaaaataaaatttttgtttgagatgatttttattatagatttttaattttttaaaaatatgatttttttaaaaagtttattttatgtatattataattatatgacgaaattaaatgtatattttatttgtatgtgtaaataaaatgtgttttgtagatagaggaattggaatagtaggtttaggaaatttataattggatagatgttttgtaattttgagtatatttatttgtatatttagtatggaaaggatttttaaagtttaaaacgagataaaatagatatatgtttttgttttttatttaattagaaatatattttatggttgttattaatttattttttttgtaaatgttaattaagaaagtaaaggtgattagttattattaggtagtttgtttttttttttgaaatgttatttggtttgaattaaattgataaagaataggaaagataattttgttgttagtgtttattttatggttttataattgaaagttttattaggttgatttaagttggttaatttatattagaggtttgataattagaaaatgttattttgtttttttgagagttgtggtaaattggatttatagattttttgagttttattttagtttagagttttttaattttgatattattggtattttgagttgaataattttttgttttgggggttgtttcgtgtattgaaggatgtttagtagtattttttattattatttattagatattaatagtattttttttttatttttttattttagttaagataatttaaaatatttttcgatattgttaaatgtttttgagagaggatttttttgtttgagaattattgttttgttttatggtgtttttgtaaaattgttttttagaggaaatataagattgtgtttttaaattttgtaaatttgtaagtttttgttattagttaaaattttatattaatttttttataggagtgttgatataattaataacgtagtgagttgttatatatatttttttatggcgattttttgatgtttatgttcgtgatcgttgtaggaaatatattttattagagaagatttggaagttttacggtttttttttttttagatattggttttataaatttttgatatttttatgaatataatgaattaggtattcgtttttttttttttggttatttattttcgttattgagattatttttataattttaaatattaaatggtattttattttttatttatatttaggaagatatattggttagaaatgaatattttaggaaggattttgattaattaggttaaaaggaaatgagagaaatgatgaaggtgagatttgagattagattggtttggaggatttataaaattatagaagttatttattttaaaatttattttatttttttaaagtttgttgaatatataggattatattttatttaggtaataattttatgtattattagttattaagttttttttttaagattgttaggtaaagattttaaaatttttatattaaatattaagagatatagaataaggattgagaaattaggatttttagttttttgttatattgttattaaattttttttattttgttgttttttatattttgttttatttttttgaaatatatattttgttttgtttttttaaaaatatatgtgttttgtttttttaaaaatagcgtatttgtatggtattttgaatgtatatttttatttgtttattttttttgattttaatatatgtgttaagtggtattattttttttagtttatagatgaagaaatagaagtttggagagattaaaggtaaagaatatgaaagaagtagtttagtgtaaaagtaattgaggttttgggttttatttttaaatggtaaaaattgtagttatttgcgtattagtttaataattttatagttgagttaaatgaaggaataattattattttacggaaaattaggagttatatgaggaaggttgggaaatgaatttttttgtaaatattttgtggatttatttttaagataaataagttataatttttgatttaagagtttattttggggaagtgatgtagtagttttttagggtaaatatatatgtgtgtgtatatatatagatatatttatatttattattttggtatattatgtaataaattgaaattttagttagtaatttttattttttttaaggatagtagtgtgtaaattgttattaatttatgatttttttattttttttgattttgagttattttgaggttaaggtgataaaaatttattttttatgggtttaaaaattttatttattttttggaaattttttaaatgaaatgattataatgaataagaattaagttttattgatgattttttttaatttttaagtttatgtatttaaagtagtttgtgatttttagttttaaatttgttgttttttataatagattgatgaatgaggtaatttaaaaaatagtttttttatggtatttattttttttttagtttttagagttatatatgtgttttagtaattatttgattaagtgtttttatggggatttagaaattttaataaagattaacgtttttgaaaaattatttttttaattgttttagtttaaggtaattttatattttgaattataaatattaaatgtgatgatttatagatttttttaatttgaaagttgggttaggattttatatatttatattaggtatttattttttttttggatggagagagtttgaattattaagaaagtagagttgtgtggtagagaaattaatattattttatatttttttttttttttataaatttaagagtaagaaaatttgttataagaattgataatgataatttaattttaaaatttaaaggtgttgtaatatttttggatagttaggataagagtaatttaagaaaatttaagttgtgtttatttagggtttgttagtcgatttatttgattgtaaagaggtataggtttttttgtaaaatttattgtgtgtttttttgttgttttatagttttatattttttgtgaatggaatattgaaatatataaataatgtaaagatatatattatgtaaaaattatagttgttttaatttttttaattgttatgtatgttatttttttttattttaatttttatatgtgtttttttgttaggttttttttttattaaattgtgtttttaatttaaaataataaagaagtttagtaagaatagggttgtatattttaaaattttataaaattttatttgtttgttatttttggtttgagagtttgtgatgtaattgaggggtgatgattgatttatgttaagtagttgaataaatagtttaaatgatgttaaagtttttatgttatgtttagtatttgaaattaataaataaggttgttattttttttaaagaacgttagtttttaatattaagtaatattaggttggtttttatttttaatttagaataaagtttgtatttttttttgtttatttgtttttaagtttggaataattttgtttttttttttgttacgtatgaagtaaagtatatttaaaattttttatagggcgggcgtagtggtttacgtttgtaattttagtattttgggaggttgaggtaggaggattaagagattaggagttcgatattagtttgattaatatggtgaaattttgtatttattaaaaatataaaaattagttaggcgtggtggtaggcgtttgtagttttagttatttaggaggttgaggtaggagaatcgtttgaatttaggaggtagaggttgtagtgagttaagtttacgttattgtattttagtttgggtgatagagggagattttattttaaaaaaataaaaaaaaatttttttatataatttaggaggtgtttattgtaaaatatgttaagggatattaaagagtgaaagaaattaagagttaaaaaaatttttagaatgaatgtattataaagatattttaatttatattagtagtgaattgttttaaataaaatgaaatatgaaatgattaaaggagtattgtttatgaattgaaaaattttgaatagtcgttttttaatgattaaaaaattaaataggacgtgtgttgtttttaatataaaatattagataatgtaaagggtatattggagaagagattaatagtggttttttttgaatggtattatttttagaataagtaaaatgtaatgatttaattatattttattatttagattaattttatatatattgttgaattgaatttggtttaatgttgttttatttttagtaaattgtaatttaatttagtatgtaaataaattgtaatttaaattaagaatatatttttgtaataagtagttgagttttggttaattttagtagttgagtttttagttagttataggttataaattgtttagatgtttaaataaggtaaagaaggagttgtaattaatgatattatttttgtttgttattttatttttttgtttgtaaatattgtttgtttattttgtagagtggagttttttaaattattattcgtttagggtgttgttttatttattaattgtttttttgttcgtttaaattttgttaaaattaatttatttaaagtttttttttttaataataataagatatgtttttgtttttttggaagtgtttatgtttagtgtttgtttttgttagggttttggaggttattagttttttttagtgaatgtaagtttttaatttgttgttagtgttttgagggtatttattttttaaataagaaaattatagtggaagtatttggaaattttttttgtaatttttattttttttttttaattattgttatattatttatattttttggtttagttttatgaagtttttatgaattgtatgttacgtgtttgttttgaattatgtgtgtttttgtatatattttaatgtttgatataaaataatgttagatttaaggatgatatgtttagagtttttataaacgtaaattttattttttgagagttatgttttttttaggtaaaagaattaaatatttagttgtatgttaattagaagtgagatggatgataattttttttgtgaaaggttttttatattttaatattttgtttatgtgtataggtatatatattttttatttgatggaaagtagagttgaagtatgtttatttttagttagggattaattggtttatttatttatttatttattatttatttgttaattattttttattgttatttaataggaaatgggatttttagttatgtttatttttcgggataattttaaattttataatttaaaattttaattagtataggtattattaaatagaatagaaagttatagcgatagattagggtgtttgaggttttttgaaatgataggtattgatgtttttattgttttatagtggtgagattgtaggggttgatttatgtgaggggttgggggagtttagaggaattagggtatttggaaagttagggaagtgagtttgtattaagtattttgatattgtaataatttttagggttatgtatgtgttgatatattattatttttaattttttttattgttaatttttttgtttgtattgaaaagatttagattgaaaagtagagtaggttttttagagaaaatgttattttttaaatttagtttacgtattttttattttttaatatatttttgttagaatttgtttaaaatattttagttgtgatatatttgtttagttttttttttttatttatttatttatgttttattagtataattaaagggatgatttttttaggaaagttttttattattggggttgatttagaagaaaatggatatataaataagaattaattttttgatggaatgttttgatgtttaatagtaatttaaataagtataatattaggtttttaaatgatatatgggaatgtaaaagtttaagttgttgaagaagttttat

SEQ ID NO: 531 - DNA, 10996 bp, Artificial Sequence
  chemically treated genomic DNA (Homo sapiens)
agtttgtttggtcgttttagggtttgttggaatttttttttcgtttatgtatttgtgaattattttacgtttgttattatcggttttttatagggtgatgtttattagtagtggtgataggttaatttttattattttttatgcggttgaatagttatttttgaattatttttttttttagtaattttttttttttcggattttttgtagttaatttgaaagaataataaggaggtggttggaaatttgttttaaggaatcgtttgtttttttttcgttggaaattttgtatttcggacgtttttgtttttgtttttatttgattttcgttttcgttgatatttaggcgcgatgatttttgttgttagtagagggtatatttattttattttcgtaaatttgaacgcgggtgttgtttagagagggggcggagggaaagacgttttgtagtaaaatttagtatagcgattggttgtttttcgcgtttgcggtaaaggtttggaggtaggagtaatttgtaatttttaaagttgaattgtgtagtgtatcggatttggaagttattatatttatttaatatttgaacgttgagttgtaaatttaacgggtaataatttattttgaatagcgtatatgttatatatatatttttttttttcgaattgtttttttttttggaggtggtggagggagagaaaagtttatttaaaatgtttttgggtgagggattaaggatgagaagaatgttttttgttttttatgtcgtggaataatataaaataaaaaatttcgagggaatatatattatatattaaatatagattattttagggagtaaataaattatgtgtggggttgggtaattagttgagtcgaagcgtaaataaaatgtgaatatacgtttgcgggttatatatagtgtatttttattagtatttagaaaaaattgtgagttagtgaattaggaaattaatgtttggaaggtagttaaattttaattagtttaagatttttttttttttttaaaaaaaggtacggaagtaatatttttttttttttttttgattagaatcgatgtattttttgtgtatgatcgtatttttaataataaaaggggaaagaggatttggaaaggaattaaacgttcggtttgttcggggaggaaagagttaacggttttttttataagggtttttgttgattttttcggttcggtttataagttttttatttgttttttttaggaagttcggtttcgcggttcgggtattttttgttttttttatattttttcgtttagtatttttgattttttttaaattcggtagttcgagattgttgtaaatcggcgttatagggcgtaaaggggatttgttttttttgaaatttggttgagaaattgggaatttcgtgtgggaggcgtgggggtgggacggtggggtatagattggtagagagtaggtaatttttttttcgttttagtttagttttggaataggtagatatattttagggttaaatagacgtttttcgtacggggttttacggaagtttgagtaggcggggtaggaggggcggtatttgttgttttggtagtaaattgggggatttagtttgggtggaaggtatttaatttagatagttgtgtatatataatgtataatatatgattttttttaataaatgtaatgggagtttatttataacgcgttttttaagtatacgtggtaatgcgttgttgggttattttaattattttaggtatcgtttttttttttatgtttttattatttttttttatttatattaatattttacgttttgaacgcgcgtttattaatattttttttttttttattttttttgggatttttgattaaagcgcggttttttttttagttttagcgaggcgttttgtagtttggtacgcgcgtggcgtggcggtgggcgcgtagtgcgttttttgtgtggagggtagttgtttcgtttgcgatgatttatatttataggataaggatgcggtttgttaaatagtattgttacggaggagtagtagagaaagggagagggtttgagagggagtaaaagaaaatggtaggcgcgcgtagttaatttatgcggtttttttattttgtttatattttagagttagagtgttcggttgttcggttgagttttttttttattttttttattttttttattttttttataagcgtttttttcgggtttttaaagtagagggcgtgggggaaaagaaaaaagattttttttcgttaattttcgtttatcggttttttataatgcgagggtttggacggttgaggattttcgagttgtgttgttcgcggtcgttatcgtcgggtttcggtcgtttttggttttttttttgtttcgagaagggtagggttttttagaggtttggcgggaaaaagaacggagggagggatcgcgttgagtataaaagtcggttttcggggttttatttaattcgttgtagtaattttagcgagaggtagagggagcgagcgggcggtcggttagggtggaagagtcgggcgagtagagttgcgttgcgggcgttttgggaagggagattcggagcgaatagggggtttcgtttttggtttagttttttcgttgattttttagttagcggttcgtaatttttgtcgtatttacgaaattttgtttatagtagcgggcgggtattttgtattggaatttataatattcgagtaaggacgcgattttttcgacgcggggaggttattttgtttatttggggatattttttcgtcgttgttaggattcgtttttttgaaaggttttttttgtagttgtttagacgttggatttttttcgggtagtggaaaattaggtaagtatcgaagtttatttgttttttaatttatttttttattattttaatgttgagatgagtcgaatgtttaaatagggtgtttttttttttatttttgcgttattgatattttttttagagtagttatggtaattggggttggggtggggggtaatttagaattggatcggggtaaagtgatttgttaagatgggagaggagaaggtagagggaaaacgggaatggtttttaagattattttttcgagatttttgttttatgaatatatttacgttgattttcggtcggtcggatatttttgttttattgtgttaattgttttttgggttttggggggttgggggttgttttgcggtgggtagaaagttttttgtattttgagttttttggagtagggatcgtatatcgtttgtgtgagttagatcgtttcgtagtcgttgatttgttttcgttttcgggagggtatttaaatttcggtttatcgtatttttgatagtcggagacggatattgcggcgcgtttcgttcgtttgttttcgcggcgattttaattcgttttgatttttttaagaagttggtatttggttttttaaaaagtaataatataatttaaaatttgggtttttagaggtgttaggacgtggtgttgggtaggcgtaggtaggggaaaagggaggcgaggatgtgttcgatttttttggaatcgttgatttggaaaaattagggcgaattttcgtatttagttttgatttttttgtcgcggtcgttttcgggtgttttcgcgttcgagatgcggaggaattgcgaggagcggggttttgggcggttttagaatagttgttatttttggtggggtggtttcgggggaggtatcgtagcggggtttttggcgtagttgtattttcgtattgagtgcgaagggaggtgtttttattattatttgatattttttttgtatttatggaggggtgttaaagttcgcggttgagttcgttattttagtcggcgagagaaagaagaaaagttggtaaaaggagtgttggacgggggcggtattgggggtggggacgggggcggtggagagggaaggttgggaggggttgcggtgtcggcgggggtaggagagcggttagggcgcgagtgggaatagtcgtagcggaggggtttcggcgcggagcggggtttacgtagtcgttagcgtttaggcgtttttcgtttttttttttaggtggcgtaaaattttgtgttttggattttggtaaattgttttttttatcgttatttttcgcggttttttaagggcgttagggtcgatttcgatttttttgtcgttgcggggtcgattttcgggttttgcgtttcgggttttcgggggagcgggggttcggcgggtattaagtcgttggtttattaagtgcgttttcgagatagtaggggattgtttaaagggggtgaaagggtgttttttttatttttttattaagattatttagtcgttttaggggatagttttgtaaggggagaggttcgggattgtggcgcgtattgcgcgttgcgttaggttttcgtattaagatttttttaatttaagattgtttttcgttttgtgtgtttcgttttagtagtttttcgcgacgatgttttttaacgttagttttattaataggaattatgatttcgattacgattcggtgtagtcgtatttttattgcgacgaggaggagaatttttattagtagtagtagtagagcgagttgtagttttcggcgtttagcgaggatatttggaagaaattcgagttgttgtttatttcgtttttgttttttagtcgtcgtttcgggttttgttcgtttttttacgttgcggttatattttttttttttcggggagataacgacggcggtggcgggagtttttttacggtcgattagttggagatggtgatcgagttgttgggaggagatatggtgaattagagttttatttgcgattcggacgacgagatttttattaaaaatattattatttaggattgtatgtggagcggtttttcggtcgtcgttaagttcgttttagagaagttggttttttattaggttgcgcgtaaagatagcggtagttcgaatttcgttcgcggttatagcgtttgttttatttttagtttgtatttgtaggatttgagcgtcgtcgttttagagtgtatcgatttttcggtggtttttttttatttttttaacgatagtagttcgtttaagttttgcgtttcgtaagattttagcgtttttttttcgttttcggattttttgtttttttcgacggagtttttttcgtagggtagtttcgagtttttggtgttttatgaggagatatcgtttattattagtagcgattttggtaagcgaagttcgtttaggtttgttaaaagtgggcggttggatattttttttatttttattggtagtttatttaacgggttatttttattaggaaggagagatagtagatttggagagatttgggagtttattatttttgaaattttgggttttagcgtttttttttattttttttttttagattgtttatgtttgtagttttttttttcgtttgttttttattttttaggaattttatttaggtttttaaattttttggtttattttataatttaatttatttttttttatttttcgttaatattttaattgttttggggcggggtggtagggagtgtatgaatgaggataagagaggattgatttttgagagtgaatgaattgttttttttttaattttcgagaagtggtgggatttaatgaattatttataaaaatgaggggttgtgtttagaggttaggtagggtttgtttgagtgcgggagttagtgaattgttttaagagtgggtgggttgaggagttgggatttttttagtttattttgaatattgaaaagtaaatttttgttaaagttggattttttttttttttttattttttttttcgtttttttggatttttggtaaaattgtaatttttttttttttattttttatttttagtaaaatagggagttgttaaagttatattaagtaatttgtagttattatttgtaatatttgaagtgtttttggtaaagttttttaaaaataggaggtgtttgggaatgtgttttgttttgggtgtgtttaaagttttattaagttttaggtaagaattggtattaatgttttattttgggaagttgtattttttttgtttatgttataatttagttgtttttttttttatgagatttttatttttatggtgagaggagtaagggtggttggttagattggttttttttttttttttttttttttttaagacggagttttattttgttattaggttggagtgtagtggcgtaattaatttttaattttttggtttaagagatttttttgttttagttttttaagtagttgggattataggtgtatattattatgttaggttaatttttgtaattttagtagagatggggttttatcgtgttggttaggatggttttttttgattttacgattcgtttatttcggttttttaaagtgttgggattataggtgtgagttagggtattaggtttagatgtggttttttggggagataattttgtttagagatttttttaacgtatttatgttttgtatttgtatagtattaatttggtaattgattattttaatgtaattttgttaaaggagtgatttttatttttttttttaaagaggaggaataagaagatgaggaagaaatcgatgttgtttttgtggaaaagaggtaggtttttggtaaaaggttagagtttggattattttttgttggaggttatagtaaatttttttatagtttattggtttttaagaggtgttacgtttttatatattagtataattacgtagcgtttttttttattcggaaggattattttgttgttaagagggttaagttggatagtgttagagttttgagatagattagtaataatcgaaaatgtattagttttaggttttcggatatcgaggagaatgttaagaggcgaatatataacgttttggagcgttagaggaggaacgagttaaaacggagtttttttgttttgcgtgattagatttcggagttggaaaataatgaaaaggtttttaaggtagttatttttaaaaaagttatagtatatattttgttcgtttaagtagaggagtaaaagtttatttttgaagaggatttgttgcggaaacgacgagaatagttgaaatataaatttgaatagttacggaatttttgtgcgtaaggaaaagtaaggaaaacgattttttttaatagaaatgttttgagtaattatttatgaatttgttttaaatgtatgattaaatgtaattttataattttggttgagttttgagattgaaagatttagttataatgtaaattgttttaaattggattttgggtataaaagaatttttttatgtttattattttttttttttttttaatagatttgtatttaagaattgtttttaaaaaattttaagatttatataatgtttttttgtaaatattgttattaaatgtaaataattttaataaaacgtttatagtagttatatagaattttaattttagtatatagtatttagtattataggtattataaattttaattttttttatttaagtatattttgttttttaaagttgatttttttttattgtttttagaaaaaataaaataattggtaaatatattattgagttaaattttaagttgtgaatgttttgtttcgtttttttttttttttaattattattatttttgtttgtttttattaattgtttttttagagggcggttttaagaaaggtaagagtttttttttgttgaaatgggtttgggggttttaaggtttttaagtttttggaggttttaagatgttttttggagattatgataatagttagagttgatagttagaaggaatggtagaaggtaggtgagaaggtgagaggtaggtaaaggagatataagaggttaaaggtagtagttaagtatataaagaggtataaggattggggagttgggaggaaggtgaggaagaaatttttgttattttagttaattagtgttagttttttgtttattttaaatttaggaattttgtttagttgatggggatacggtgggaattagtttttgttgtttttataattaggcgttagttttgtttatgggttatttcgtaaattttagaggatttttgggaggaatgttattattaattttattttataaataaggaaatagaagagtttaaagaggttatgtaatttatttgtagttacgtagataatataaagtagtaatttggatttattttgtttaaaatatttaatttttcgttattatgttttggtttatttgggtttaatgtgttgagattaagaaggtttaggatttaatggatagatttaagttataataatgttaagttttatttgtgttttaagtatttttaagtattttatttttaattttatattaattttatgaaggagatattgttgatttttttatattagaagtagagagggaagttgaggtatataaagatttatttatatgtttaagatttattgatagggaaaagtggaagcgagatttgaatttaggttgtttatttttaatttgtttaagttattttttagacgacggtaggaattagttggttgtttgtgagtataggagttatagtttagtgggttatgttttttaagttttaatatttaagtttggttaggtattagtttttttttttttgtgatttattttgtttttattttgttgtttattgtttaatttttttttttataatgagaaggttattattttgatttttattttagttatttgttgaattagatttatgacggtttttgggaagaagttagtttagattataaaataaaatatatttattttttgttatgggagttattattttagaaattataaattttttttgtttttatttttttttatatatttatgatatatgtttattttgagtttttgaaaaggtatttttgaatatgtgtattaattataagtttttgaaaatttatggtttaaattagaaatgatgttgattatataggtaaatgaaggatgttattgttgttttaattattttattgttttagttttaaagtaggtttttagttttttgtattttgggattttaatttattattatttataaattaataaataattattttttttgattttgatttttagaataatttatttaaaattttaatgttttttttttgattttttttttgagttttaagtatcgttattatagttttaaattggtacgttatataggcgaattttaaagggagatgtaatttatagaagtatagtagtttaaagggttataaaagtaaggcgtttttaaatagtttagtttttgtttttttgtggtttagggttggagtgtagttttggggtgatttatttgggaatcgggaaggtgttagtttgaattattaagtttaggtaagtttttagaataggagagagtgtttttagtaaggaaaataattttttattttaaataattaggaaagaattttagggatgtggagtttggttatgggaatagaaaggaattattttaagtgtttattaggtcgtttttatttttattgagttagagaatggttttgaaaataggatagatgttaatttttttttcgaaagttaggttgattttgattataatataaattggtttttagagtttatatagggagattttaggggtttttgttattgtgtaatttattttgtagataataattaagaatcggacgtgaaggggaggagtttgtaatttggttaggaatgtataagaaggaataagttaattttgattatgttttttatttatgatattatttaggaattaatgatttttttagaggatttttggaatgattttgttgagggatggaatgtataaagaggaaggaagtgttattttatgttgttatttggaagtaataaaggagattaatagtatgaaaataattaattaaatttgaaaatgaataaagtttttataattttagtttaatatttagagagtttatagtttggatgtataagtaaagagttttttgttggtttttaagataaatttttatataaaatttgggaaaaaggataaaaatgttgtattagggggttttttgtggtttgtttgtaataattataattggtttaattaataattattttttagtatatatattaagggtttttgtagtatttttttttatcgataaataatttttagtttagaaaatgtcgagggatgttttttatttttgtttataaatgtatttttagatgattttataaaaggttttttttttaagtttatagaatattataagattatattaaaggagaagagaggtcggtcgaggtagtttatatttgtaattttagtattttgggaggtcgaagtgggcggattatgaggttaggagatggagattattttggttaaaatagtgaaatttcgtttttattaaaaatataaaaaattagtcgggcgtggtggtatagtttgtagttttagttatttaggaggttgaggtaggagaatcgtttgaatttgggaggtagaggttatagtgagttgagattgtgttattgtattttagtttggatgatatagcgagatttcgttttaaaaataaataaataataaataaataaataaataaaggagaaaaagtaaaaataaagttagtaggatgggagtaaggatttatttttaaaaataaaattaaaaagattttgttatttatttttaaagttttagtaaaaagttttttttttagtttttttaggagagaatttatattaattttttatttagaggaaaatatttagaaatgttggttttgttaaattggttggagacgattgtaaatgattgtaagttgattttatttttaattttattttatttattattagtttatattaagtt

SEQ ID NO: 532 - DNA, 10996 bp, Artificial Sequence
  chemically treated genomic DNA (Homo sapiens)
agtttagtataagttaatagtgaataaaataaaattaaaaatgaaattaatttatagttatttatagtcgtttttaattagtttggtaaagttagtatttttgggtgtttttttttaaatggagagttggtgtaagtttttttttgaaggagttagaaaaaagattttttgttaaggttttggaggtaggtagtagagtttttttagttttatttttaaaaataagtttttgtttttattttattggttttgtttttatttttttttttttatttatttatttatttattatttatttatttttgagacggagtttcgttgtgttatttaggttggaatgtagtggtataattttagtttattgtaatttttgttttttaggtttaagcgatttttttgttttagttttttgagtagttgggattgtaggttgtgttattacgttcggttaattttttgtatttttagtagagacggggttttattgttttagttaggatggtttttattttttgattttatgattcgtttatttcggttttttaaagtgttgggattataggtgtgagttatttcgatcggtttttttttttttttaatgtagttttataatattttataaatttgaaggaggagttttttataaagttatttagaagtgtatttatagataagggtggagaatatttttcggtattttttagattaaggattatttatcgatgggaaaaaatgttataggggtttttagtgtgtatattaaaaaataattattgattgagttaattatagttattgtaaataaattatagaaaattttttaatgtaatatttttgtttttttttttaagttttgtgtgagagtttgttttaaagattagtagagaattttttatttatgtatttaagttgtgagttttttaagtattaggttgggattgtgaaaattttgtttatttttaaatttgattgattgtttttatattgttgattttttttgttgtttttaaatggtagtataaaataatattttttttttttttatatattttattttttaataaaattattttaggaattttttgggagagttattaatttttggatagtgttatggataaagggtatagttagaattagtttatttttttttatatatttttgattaagttgtaaattttttttttttacgttcgatttttgattattatttataaaataggttgtataatggtagagatttttgggatttttttgtataggttttaagggttaatttgtattgtggttaagattagtttgattttcgggaaggaagttggtatttgttttgtttttagagttattttttggtttagtaaaggtaagagcggtttaataggtatttggaatggtttttttttatttttatagttaagttttatatttttaaagtttttttttgattatttggaatggagagttgttttttttgttaggaatatttttttttattttgagggtttgtttggatttagtgatttagattaatattttttcgatttttaagtgagttattttagagttgtattttagttttaggttataaaggggtaaagattgagttgtttaagagcgttttgtttttgtaattttttgaattattatatttttgtggattgtatttttttttgaaattcgtttatatgacgtgttaatttgaagttgtaatggcggtatttaggatttaaaagaaggattaagaaaaagatattaaggttttgaatagattattttaggagttagagttaaagaaagtaattatttattgatttatgggtggtggtagattaaaattttaaagtatagggagttgaagatttattttgagattgagataatgaggtaattagaatagtaatagtattttttatttatttatataattaatattatttttggtttgggttataggtttttagaggtttataattaatatatatgtttaaaaatatttttttaaggatttaggatgagtatgtgttatgagtatgtaaaaaaggatggaagtaaggagagtttgtagtttttaaaataatgatttttatgataaagaataaatatgttttattttatgatttgaattggtttttttttaggagtcgttatgagtttgatttaataaatggttaaggtaggagttaagatggtgatttttttattgtaaaaggaaaaattaaataatgaataataaaataaaaataaaataaattataaaaaaaggggaattgatgtttgattaggtttagatgttgagatttaaaaaatataatttattggattgtaatttttgtatttataagtagttagttgatttttatcgtcgtttgagaggtggtttggataggttaggagtaaatagtttgggtttaaatttcgtttttatttttttttattagtgaattttgggtatgtggatgagtttttgtgtgttttagtttttttttttatttttaatatggggaaattaatagtattttttttatggggttgatgtagagttagggataaaatgtttaggagtgtttgggatataaatagagtttagtattgttatgatttgagtttgtttattaggttttaaatttttttgattttagtatattagatttagatgaattaaggtatgatagcgaagggttaagtgttttgaatagaatgggtttagattgttgttttgtattatttgcgtggttatagataagttatataatttttttgagtttttttatttttttgtttgtgaaatagggttaatagtagtattttttttagagattttttggggtttgcgagataatttatggataggattggcgtttggttgtgaaggtagtagaagttggtttttatcgtgtttttattaattgggtagaatttttgggtttggagtgagtaggggattggtattggttaattaaagtaataggagttttttttttattttttttttaattttttagtttttatgtttttttgtgtatttaattgttatttttgattttttgtattttttttgtttattttttatttttttatttgttttttgttattttttttaattgttaattttggttgttattatagtttttaggaagtattttagaatttttaagaatttaaagattttaaggtttttagatttattttaatagaggaaaatttttgttttttttaagatcgttttttgaaggggtaattgatgaaaataaatagggatggtggtggttgggagggggaagaaacgaaataaaatatttataatttaagatttggtttaatgatatatttgttagttattttattttttttaaaaataatagaaaaaaattaattttaaaaagtaaaatgtatttaaataaaaaaaattagggtttatagtatttataatattaggtattatatattaggattgaaattttgtgtaattgttataaacgttttattaaagttatttatatttaatggtaatatttatagagaaatattgtgtaaattttaaaattttttaaaaataatttttaaatataaatttgttaaagaaaaaaaaaagatggtaagtataaaaaagtttttttatgtttaaagtttaatttgaggtagtttatattatggttaaattttttagttttaagatttagttaaggttgtgaggttgtatttgattatgtatttgaaataagtttataggtgattgtttaggatatttttgttagaaggaatcgttttttttatttttttttacgtataagagtttcgtagttgtttaagtttgtgttttaattgttttcgtcgttttcgtaataagttttttttagaaatgagtttttgtttttttgtttggacggataggatgtatgttgtggtttttttaaggataattattttgggggtttttttattgttttttaatttcgggatttggttacgtagggtaaaaaagtttcgttttagttcgttttttttttggcgttttaagacgttgtgtgttcgttttttgatatttttttcggtgttcgaggatttggggttggtgtattttcggttgttgttgatttgttttaggattttgatattgtttaatttgatttttttggtagtaggatagttttttcgagtggagggaggcgttgcgtagttgtgttgatgtgtggagacgtggtattttttgaggattagtgggttgtgaggaggtttgttgtggtttttagtagaaggtgatttagattttgattttttgttaggagtttgttttttttttatagaaataatatcgattttttttttatttttttgttttttttttttaagaaaggaaatagaaattatttttttagtaaggttatattaaaataattaattattagattaatgttgtataaatataaggtatgaatacgttagaaaggtttttggataaaattatttttttaaagagttatatttaagtttggtgttttggtttatatttgtaattttagtattttgggaggtcgaggtgggcggatcgtgaggttaggagagattattttggttaatacgatgaaattttatttttattaaaattataaaaattagtttggtatggtggtgtgtatttgtagttttagttatttgggaggttgaggtaggagaattttttgaattagggggttggaggttgattgcgttattgtattttagtttagtgatagagtgagatttcgttttaaaaaaggaaaaaaaaaaaaaaagaattaatttagttagttatttttattttttttattatgaaggtaagagttttataaagggaaagatagttgggttatggtatggataagaaaagtgtaattttttaggataggatattgatgttaatttttatttaagatttaatgaggttttggatatatttaaagtaaagtatatttttaagtattttttatttttgagggattttattaagaatattttaggtgttgtaaatgatagttgtaaattgtttggtatgattttagtaattttttattttattggaaatgaaaaataaaaaaaaaaaaattgtagttttgttaaaagtttaagagggcgggggaaggaataaaagaaaaaaaaaagtttaattttggtaaggatttgttttttagtgtttaaaataggttgagaagattttagttttttagtttatttatttttgaggtagtttattggttttcgtatttaggtaggttttgtttagtttttaaatatagttttttatttttgtagatagtttattaaattttattatttttcggaagttaagagggaagtaatttatttatttttagagattaatttttttttatttttatttatatattttttgttatttcgttttagggtaattaaaatgttaacgggaggtaagaagaagtggattgagttgtaagataagttagaaggtttaaaaatttaaatgaaatttttgaggggtgggagataaacggggaggggggttgtaaatatgggtagtttaaggggaagggatgggaggaaacgttaaagtttaaggttttagaggtgatgagtttttaaatttttttagatttgttattttttttttttaataagagtggttcgttaaataagttgttaatgaaaatgggaaaggtatttagtcgtttatttttgataggtttgggcgggtttcgtttattagagtcgttgttggtggtgggcggtgtttttttatggagtattaggggttcggggttgttttgcggggaggatttcgtcgaggagagtagagaattcgaggacggagagaaggcgttggagttttgcgaggcgtaggatttgggcgagttgttgtcgttgagagggtaggggaagattatcgaggggtcgatgtattttgaggcggcggcgtttagattttgtaggtataagttggaggtggagtagacgttgtggtcgcgggcggggttcgggttgtcgttgtttttgcgcgtagtttggtaggaggttagtttttttgagacgagtttggcggcggtcgagaagtcgttttatatatagttttggatgatgatgtttttgatgaaggtttcgtcgttcgggtcgtagatgaaattttggtttattatgtttttttttagtagttcggttattatttttagttggtcggtcgtggagaagttttcgttatcgtcgtcgttgttttttcgaagggagaagggtgtgatcgtaacgtaggagggcgagtagagttcggagcggcggttaggggataggggcggggtgggtagtagttcgaattttttttagatattttcgttgggcgtcgggggttgtagttcgttttgttgttgttgttggtagaagttttttttttcgtcgtagtagaaatacggttgtatcgagtcgtagtcgaggttatagtttttgttggtgaagttaacgttgaggggtatcgtcgcgggaggttgttggagcggggtatataaagcgggaggtagttttgagttaaaggggttttggtgcggaaatttggcgtagcgcgtagtgcgcgttatagtttcgaatttttttttttgtagagttattttttaaagcggttgggtggttttggtgggggaataaagggagtatttttttattttttttggatagttttttgttatttcggagacgtatttagtgaattagcggtttggtgttcgtcgagttttcgttttttcgggagttcggagcgtaaagttcgggagtcggtttcgtagcggtagaggaatcgaaatcggttttggcgtttttaagaagtcgcgggaggtggcggtgaggaaaataatttgttaaaatttaaggtataaagttttgcgttatttgaaggagaaggcgagaggcgtttgggcgttagcggttgcgtgaatttcgtttcgcgtcggggttttttcgttgcggttgtttttattcgcgttttagtcgtttttttattttcgtcggtatcgtagttttttttaattttttttttttatcgttttcgtttttatttttagtatcgttttcgtttaatattttttttgttagttttttttttttttttcgtcggttggagtggcgagtttagtcgcgggttttaatatttttttataaatataaggggggtgttaaataataataggggtattttttttcgtatttaatacggagatgtaattgcgttagagatttcgttgcgatatttttttcggagttattttattaagggtagtagttgttttggaatcgtttagagtttcgtttttcgtagttttttcgtatttcgggcgcgaggatattcgagggcggtcgcggtaggggagttagggttgggtgcggagattcgttttggtttttttaagttaacgattttaggagaatcggatatattttcgtttttttttttttttgtttgcgtttatttaatattacgttttaatatttttagagatttaggttttaaattgtattattgttttttaaaaagttaaatgttaattttttaaaaggattagggcgggttggaatcgtcgcggggataggcgggcgggacgcgtcgtagtgttcgttttcggttgttagaaatgcggtgagtcgaaatttaaatgttttttcggagacggggataagttagcggttgcggagcgatttggtttatataggcgatatgcggtttttattttaaggagtttaggatgtaaggggttttttgtttatcgtaaagtaatttttagttttttaaaatttagagagtaattaatataataaagtaggaatgttcgatcggtcgggagttagcgtgaatatatttataaggtagaaatttcgaaagggtagttttaaaaattattttcgttttttttttgttttttttttttttattttgataagttattttatttcgatttagttttggattattttttattttagttttagttattataattattttgagaaaagtgttaatagcgtaggaatgggagaaaagatattttatttaggtattcgatttattttagtattaaagtgataaaaaaataaattaaaaggtaagtggatttcggtgtttatttggttttttattattcgaaaaaaatttagcgtttaagtagttgtaaggagagttttttagagaagcgggttttggtagcggcggggaagtgtttttaaatgggtagaatagttttttcgcgtcgggagagtcgcgtttttgttcgggtgttgtaagttttagtgtaaagtgttcgttcgttgttatgggtaaagtttcgtggatgcggtaagggttgcggatcgttggttgggggattagcgggagggttgggttagaggcgaagttttttattcgtttcggatttttttttttaggacgttcgtagcgtagttttgttcgttcggtttttttattttagtcggtcgttcgttcgttttttttgtttttcgttggaattattatagcgagttagataaagtttcgaaaatcggtttttatatttagcgcgattttttttttcgttttttttttcgttaagtttttgagaagttttgtttttttcgaggtaggaggggagttagggacggtcggggttcggcggtggcggtcgcgagtagtatagttcgggggtttttagtcgtttagattttcgtattataaagggtcggtgggcggagattagcgagagaggattttttttttttttttttacgttttttgttttgggaattcgggaggggcgtttatggggagggtggggagggtggggaaggtggggaggagatttagtcgggtagtcgagtattttagttttaggatgtaaatagagtaagagagtcgtatgaattaattacgcgcgtttattatttttttttgtttttttttaaattttttttttttttttgttgttttttcgtagtagtattgtttgataaatcgtatttttgttttgtgagtataaattatcgtaggcggaatagttgttttttatatagagaacgtattgcgcgtttatcgttacgttacgcgcgtattaggttgtagggcgtttcgttaaggttggggaaagggtcgcgttttgattaagagttttagggagagtggaggaaagaagggtattaatgggcgcgcgtttagagcgtgggatgttagtgtagatagggaggaatgatagaggtataaggaggaaaacgatgtttagaatgattaaaataatttagtaacgtattgttacgtatatttggagagcgcgttatgaataaatttttattgtatttgttggggggagttatgtattatgtattatgtatgtatagttatttggattggatattttttatttagattgagttttttaatttgttgttaaagtagtagatatcgttttttttgtttcgtttgtttaggttttcgtggggtttcgtgcgggaggcgtttgtttagttttgagatgtgtttgtttgttttagagttgggttagggcgagagggaggttgtttgttttttgttagtttgtattttatcgttttatttttacgttttttatacggagtttttaattttttagttaggttttagaagagataaattttttttgcgttttgtggcgtcggtttgtaatagtttcgggttgtcgggtttgggagaaattaaaggtgttagacgggagaatatgggaggggtagggggtattcgaatcgcgggatcggattttttaaaaggggtaagtggagagtttgtggatcgagtcgggggagttagtagagatttttgtgaaaaaaatcgttaattttttttttttcggataaatcggacgtttaatttttttttaggttttttttttttttttattattggaaatgcggttatgtataaaaaatgtatcgattttgattaaagaagaggagaggagtattattttcgtgtttttttttgggggggggggggagttttgagttaattaaaatttggttgttttttaggtattaattttttagtttattgatttataattttttttgaatattagtgaaagtgtattgtatgtaattcgtaaacgtgtatttatattttatttacgtttcgatttagttagttgtttagttttatatatgatttgtttgttttttgaaatgatttatatttaatatataatgtatattttttcgggattttttattttgtgttattttacggtatgaaaaataaaaaatattttttttatttttggttttttatttaaaggtattttaagtaaatttttttttttttttattatttttaaaagagaaaataattcgggggaaaggggtgtgtgtatagtatgtacgttgtttaagatgggttattattcgttgagtttgtagtttagcgtttaagtgttaagtgaatatagtagtttttaaattcgatgtattgtataatttagttttaaggattgtaaattatttttgtttttaggtttttgtcgtaaacgcggggagtaattaatcgttatgttggattttgttgtaaagcgttttttttttcgttttttttttgggtagtattcgcgtttaggtttgcgaaagtaaagtaagtgtgttttttattggtagtagagattatcgcgtttggatgttaacgagggcgggggttaggtgggggtaggagtaggagcgttcgaggtgtaaggtttttagcgggggaaggataggcggttttttaaaataagtttttagttatttttttgttatttttttaggttggttgtagaaggttcgaagaaagaggagttattggaggaaaaagtggtttagaggtgattatttaatcgtataagagatggtgaaaattaatttattattattgttaatgaatattattttatggagaatcggtaatggtaaacgtgaaataatttataagtatatagacgaaaaaaaaattttaataaattttaaaacggttaaataagtt

SEQ ID NO: 533 - DNA, 9219 bp, Artificial Sequence
  chemically treated genomic DNA (Homo sapiens)
aaattttgggaggttaagatgggtagattatttgaaattaggagttcgagattagtttgagtagtatagattttgttttaataaaaattttaaaatattttttaaaattagttaggtatagtggtatatatttgtagttttagatatttgggaagttgaggtggaaggatgatttgagtttatggttttgaggttgtagtgggttatgatggtgttattgtattttagtttaggttatagagtaagatattatgttaaaagaaaaaaaaatttaattatttttgtttattttttttttttttttttttttttttttttttttttttttttttttttgtaatatatatatatatatatatatatacgtacgtatgtacgtattatatattttgacgatttttaaaggttttttgtggttggatgaaatttagaggttttattttttttgtatggttttgtatgatttggtttttgtttttttttttgattttattttttattcgttttttagtttttttttttgttttagttatattggttttttgtttgtcgttaatatttttagtttggtttcgttttttagtttttgtagtagttgttttttttatttgaaatgttttgtttttaaatttttatttggttattattttttgttatttgggttttagttttagtgttatttaaatatttaaagaggattttgttgattattgtatttaaaagtagttttttgttatttttataatattagtttgttttatttttttatagtattaattttttttttagtttttttttttttcgtttggttttattggaatataagttttataggtgttggtattttttttgatttttttgtttttatgttttttttgttttaggataatgtttagtatgtgttaggtacgtagatatttattaaatggaggaatggatgaataatttataaagtaggataaagtttaattttaggtttgtggtttagattggatttatatttagagttagatttaagtttagtgttaggagtggtggtaaattggttttaagattagttttagaaatagggttgggttggggtagaggagaagttttatttagggggttattaattgggatgtgtttagatttgaggttagggttatagttggggttgagtttgagttgtgatttgggttgaggttaaatttgggttagggttgatgttggtattaaattttaatttaggttttgaggttaagtttaagtttgaagttaatgttattttagttttatttggaggttttagagattttattagtttttttataaagattattataaagattgtatttttttgagtttggggtataagattttagttattagtttttttatttagggaaagttttaaattaattgttggtttgtttaagaaagaaattaaatttatataattttcgaaattgagattgaaattaagattggtttattttaaggagtatttttcgtatattttatatgtacgtgatattgagttttagtttagttttattttttttttttttgtgttttttatgtttttttattattttttttgtttttttttttttgttttttaatgttttattttttttttttaatttaaatttttttttgtgttttattgttaattgtaatatttttttttgtttgtttgttttgttttgttttgttttttggttggtttgtttgaaatggagttttattttgttgtttaggttggagggtagtggtacgatttcggtttattgtaattttcgttttttgggtttaagtagtttttttgttttagtttttttagtagttaggattataggcgcgtgttattatgttcggttaattttttgtatttttagtagtgatggagttttatcgtattagttaggattgtttttattttttgattttgtgatttgttcgttttagttttttaaagtgttgggatgataggtatgtgttattgtttttggttttgtaataatattttatattttaatatagtttagttggggttttagtttattagtttatattattagagaagtagaaagagataataggaagtaaaaaggattttgagagaaagggtaatatagagaaaaagaaaggagtaggggttaaaagggaaatttatattgatataagagataataaggttaaaagaatgagaagaaggttgggcgtagtggtttacgtttataattttagtattttgggaggttaaggttggtgggttatttgtggttaggaatttaagattaatttggttaatatggtgagatttcgtttttattaaaaatataaaaaaaaatttggcgggtttggtggcgtgtgtttgtaattttagttattcgggaggttgaggtaggagaatagtttgaatttgggaggtagaggttgtagtgagttaagatcgtgttattgtattttagtttgtgcgatagtgagaaattgttttaaaaaaaaaaaaaggaaaagaaattttttgatttattttatttgatagtaggttataagatttttattttagaagaggttttgttttatatttgggaggaaggaatgttgtatagagagattaagaagaatatggttaggttttgttgggatttttttagttttagtttgtgattattagatgatattttttttgtttaattatatttttgtatagttgtttattttttattaaatttaagtataaaaatagtttttttttgggtttttgggtttttatttttgaaggtttttatgttatttaaaattttgattaaataaatgtattatgttttttttttgttaatttgttttttattataggagtattggttataatttttatgatgggttaggaagggattatttttttttgtttttatagaaataatagttaagattagtaaagtataaaaggtaaaggggtaggtttttaagtagagaagaataggagaaatagtttatatatatttagaatgttatttatatgtttttttatgttatattaagattttttagggattttgtgtttggggagagaagtggtttgttttatgtaatagtgggttttatttcgggttattattagttttagttttaatttttttaatattttttaagtaaaattatattagtagtagtaataatatttgaggtgataagttggtattattttaaatttaggaaaagtgaataaagttatttttagaaattgttttttttaaattttgtaatttgtaagttaagtgaaaatgggtttatgtatgagaatgttcgtgttagatattttttgtgttagataaaaattagaaataaattaaatttttattaatagaatatattagaatatattgatataatagaatattatattataatttttttaaaaaatattattgatatatataattacgtatatgaattttataaatataatgttgattgaaagaagttaaatagaaatgagtatattttgtgtgattttatttatatgatgttttaaattaggaggaaataatttatggtgataaaagtgagagagtggttggttatttttggagggtattagtagggagggggtatgagggaatttgttggggatttgaaaatacgtggagttgggtggtggttatatatagatggaaaaatttattagttgtatatttaagaggtgtttattttatatttaagttatatattaataaaaaggaaaaaaattttggaaatttttttttttttttttgagatagagttttgttttgttttttaggttggaatatagtggtgcgattttgatttattgtagttttcgttttttaggtttaaataattttttagttttagtttttcgagtagttgggattgtagatgcgtattagtacgtttggttaatttttgtatttattatagagatggggttttattatgttggttagttggttttaaatttttgattttaagtaattcgtttattttagatttttaaagtgttaggattataggtgtgagttattgtattaggtttggaataattttaaaataatgtattggttttgtaaatgtagttttagaataagttttttagttgtttttattttattttaagttattatttttaagttttatttatgtggaattttgaaattttttttgtagaaaattttggaaggtgtttgttatattgattttggaatgtgtgtttatttggggttatataaatttgttttgtggaagttatttgaagttaggaagagatggagggtattttttaggagtgagatgagattttattatatttgattgtttagtattatttttgagtaaggggattaaaaaatttattttttaaattaggatatttttaagagtggaagggggatttattaatatttttatttggataagaggtaaatattagaatgttttcgatgaaggggatatataatggatttttttgatgtgaaatttgttagatgggttggaaagttcgtatattgggataagtatgatttgagttgtttgggataaggataggggtataagagaaggaaatgggtaaagagagaagtttgtatttagttaagggtgtagagatgttatatatgattgttttttagggaatcgggtttttagtttatattttagttgtttaatcgttttttttttgaattgattgttttttttttggaattttaggtttgattttattttttggtttttttagtttacgatttttttgattcgatttttttttttagaatttagtcgtttgaatttttagtttgtggtttttttttaggttttagttttttttgtttttgattgaaatagtagtattttttaagttttgggggttttttcgggttttagtttcgatttagaattcgttcgttgtttgttacgttgttattgtcgttttttttataaagggatttgagcgttcgggtttaggggttttatatagtaggtgaggtttttttgttttatttttttgggttgttcgtgtttcgtgttttggattatcgtttcgtagtgttttgttttttgtttgggtttcggttttttttgtatttgttgtttggattttcggtttgtttgggtttgggttttggtgggtttggttttggtttttttttttgtttttgattttttatttgttagttttattgtttttgttatatattttttgtttttgttatggtttttttttgttttttttttgtttttttttgtttttttttgtttattttggggtttttttgattgtattttgtttttttttttgtcgatttttttttcgggggtcggggggtgttgttttttagggcgggaggtttgtttttcgtcgcgtgtttcgtttcgtttattgtttttttttttttttttttttttttgtaggttttttttatgatattatttgaacgttttttttttttaagggtgtgtggtattattttatattttttttttttggggttgttgttggttttgttgtttggggtttaggtgaggtagtaggagaatgggggttgttggggtggtttagttaaattttgagttttagagttttttttaattttgtttttttttaggggttttttggtgttggttttatatttttagttgtttagattgttcgttagtattttaagatgtattttgtttatagtaattttaaatttgttgtttattttattggtaaatatttatttgattttttagatatgtttttattagttttttttttatttttgttttaggaatttaagtatttattttttttttttaattttttttacgttaaaaaaaatagagggagtttatttttatgtttttttttgttattttttaggaatttagttgtttagtgtttatttttttagggattgagatttttgatttagatttttgattttttatttttattttttatggttttttttaggagattttagtaagtagaatttattgttttggagagtaaatacggatcgtgtttttttttaggatggtttttttttgagtaataatttttttttggtttttattagtggtatttatttcgtttatttttaggtggttttttttgggaaagtttatttttttaaggttattttttttttattttatttggtttatgaggtttagtttttttttttttagtattttttttatgtgtttttttttagtttttagaagatggtgtatttagggttgtaggaattttggttgtattcgatgtattacggggttgcgttttagtttatttagggagattagttatttatttatatagatggtattttttatttagtttttagttttagtattgttttttttggagttttcgttttgtagaatttggaaaaatttagaaagaaaaaataattgattttaagattttttttttattttgtttttattttgattattttaggggtcgttattattttttttttggttattttaatagtttaagttttttttgattaagttatcggagtttttaaagaaggaattttaggtattttaggggattatatttttttgaattatttttgatgtttgtttggttgaggattttaagtttgtttaggaatttttagtttaaagttgttggtttgttttattagttaggtggggtttagatttatatatagaggaagagtaggtatatggaggagtttgggggatgattagaggtagggaggggattatttatgaaggtaaaaaaattaaattatttatttatggaggatggagagaggggaataatagaagaatatttaaggagaaatagagataggtttaagagatgaagagtgagagggtatgcgtataaggttgattaagagagaaagaagtaggtatgagggattatagggttttagaaggtagggaaaggttttgaaagttagttgtcgattagagttttatacggaggtatttgtattttcgatgaagtttaataaattttttttttttgaaatgttgtttgtttgtgtgtgtgtgtttgggagtgagaattttttagtttatttaaggaatggagggagggatagagggtttaaagggagtaagagttgtggggagaataaaaggataagggtttagagagttttagggatatgtgatggatttattaggtgaggtcgttagattgttgtaggggaagtaaaggagaagttgagaagatgaaggaaaagttagggtttggaggggcgggggttagggagtttttgggagatatggttatatgtagcggttttgaggaatgggttataggagatttttggggagatgtgattatagtaatgggtaggagaatgtttagggttatggaagtcgagtatggggatttttttttaacgaagatagggttatgtagagggttttagggagtgaaagagtttttaggatttttaggtatggaatataggggacgtttaagaagatatggttatatattggggttttgagaagtgagagttttatgaaaaaaattagggattttagagttttttggaagttaagattgaaattagtattatgagttttcgggttagaatgaaagaagaaggtttgttttagtggggtttgtgaattttcgggggtgattttatttttcggggttgttttaggtttgtttttgttatttttatttagttttttttgaggttttaagtttgttattaagtttttagtttttttttttcgtagggatttaaatataggttttaggatttaatatagtttttttttttaatttcgtttttttttttttaaggatttagttttttgaagttttttttagttttagttttattttttttttgtattttgtttggaagttagaaggaaatagattatagatttggtttttaaaagaaatggaggtaataggttttgaggggtatggggacggggtttagtttttagggttttatatataaattagttagtggtttagaagatttttttcggaatcggagtagggaggatggggagtgtgaggggtatttttgatgtttgtgtgtttttaattttttaaattttcgttttcgcgatggagaagaaatcgagatagaaggtgtagggtttattatcgttttttttagatgagtttatgggtttttttattaaggaagtttttcgttggttgaatgatttttttttcgtttttttttcgttttagggatatataaaggtagttgttggtatatttagttagtagacgtttttttagtaaggatagtagaggattagttaagagggagagaagtaattatagattttttttgaaaataatttttagacgttatattttttgataagttgttaggtaggtttttttttttttatatattgatttacggttttatttttttttttttggaaaggatattatgagtattgaaagtatgattcgggacgtggagttggtcgaggaggcgttttttaagaagataggggggttttagggttttaggcggtgtttgttttttagtttttttttttttttgatcgtggtaggcgttattacgtttttttgtttgttgtattttggagtgatcggtttttagagggaagaggtgagtgtttggttagtttttatttatttttttatttaaggggaaatggagacgtaagagagggagagagatgggatgggtgaaagatgtgcgttgatagggagggatggagagaaaaaaacgtggagaaagacggggatgtagaaagagatgtggtaagagatggggaagagagagagagaaagatggagagataggatgtttggtatatggaaggtgtttattaagtgtgtatggagtgaatgaatgaatgaatgaatgaataagtagatatataaataagatatggagatagatgtggggtgtgagaagagagatgggggaagaaataagtgatatgaataaagatggtgagatagaaagagcgggaaatatgatagttaaggagagagatgggggagataaggagagaagaagatagggtgtttggtatatagaagatatttagggaaagagttgttgaatgtttggaaggtgaatatatagatgaatggagagagaaaattagatattttagggttaagagcgtaggttagataggtagttagttgttttttttttaagggtgattttttcgatgttaattattttttttttttttaatagt

SEQ ID NO: 534 - DNA, 9219 bp, Artificial Sequence
  chemically treated genomic DNA (Homo sapiens)
attgttggggagaaggagaatggttaatatcgagggagttatttttaaaggaggaatagttggttgtttgtttggtttgcgtttttagttttgaggtgtttggttttttttttttatttatttgtgtatttattttttaggtatttaatagttttttttttgagtgttttttgtgtgttagatattttatttttttttttttttattttttttatttttttttttagttgttatatttttcgttttttttgttttattatttttatttatattatttgtttttttttttatttttttttttatattttatatttgtttttatattttatttatatatttgtttgtttatttatttatttatttatttattttatatatatttagtgagtattttttatgtgttagatattttgtttttttattttttttttttttttttttttattttttgttatatttttttttgtattttcgtttttttttacgtttttttttttttatttttttttattagcgtatattttttatttattttattttttttttttttttgcgtttttatttttttttgggtgggagagtggatgaaggttggttaggtatttattttttttttttgggggtcgattattttaaagtgtagtaggtagaagagcgtggtggcgtttgttacgattaggaaggagaagaggttgaggaataagtatcgtttggagttttggggtttttttgtttttttggggagcgttttttcggttagttttacgtttcggattatgtttttagtgtttatggtgttttttttaggggagagagggtggagtcgtgggttagtatgtgagaggaagagaatttgtttggtagtttgttaggggatgtggcgtttgagggttgtttttagggggggtttgtagttgttttttttttttttagttggttttttgttgtttttgttgagggagcgtttgttggttgggtgtgttaataattgtttttatatgtttttggggcgagaggagggcggggaaagaattatttaattagcggaaaatttttttggtggagaaatttatgagtttatttggaggaagcggtagtgggttttgtattttttgtttcggttttttttttatcgcgggggcggggatttggaaagttggggatatataagtattaaggatattttttatattttttattttttttgtttcgatttcgaggggggttttttgggttattgattgatttgtgtgtaggattttggaggttgaatttcgtttttatgttttttaaaatttattgtttttattttttttggggattaggtttgtggtttgtttttttttaatttttagataggatgtaggaaaaagatagaattagaattgggaggggttttagaaagttgagtttttgagggagagaaaacggggttggagggaaaagttgtgttgagttttgaggtttgtgtttgggtttttgcggggagaaggagttgggggtttggtggtaggtttgaggttttaggaaaggttgggtgggggtagtagggataagtttgggatagtttcggggagtgaaattattttcgggaatttatagattttattggggtaggttttttttttttattttgattcggagatttataatgttggttttagttttggtttttaaggaattttggggtttttgattttttttatgaagtttttattttttagggttttagtgtgtggttatatttttttaaacgttttttgtattttatatttggaggttttggaggtttttttattttttggggttttttatatggttttgttttcgttaagggggggtttttatattcgatttttatagttttggatatttttttatttattgttgtggttatatttttttagaggttttttgtaatttattttttagagtcgttatatgtggttatattttttaggagttttttgattttcgtttttttagattttgattttttttttatttttttagttttttttttgttttttttgtagtagtttggcggttttatttggtgagtttattatatatttttgaagttttttgagtttttatttttttgttttttttatagtttttgttttttttgagttttttgtttttttttttattttttagatagattgggaagtttttatttttagatatatatatataagtagatagtattttagagaaaagaggtttattgggttttatcgagggtgtagatgttttcgtgtggggttttggtcggtagttggtttttagagtttttttttgttttttggggttttgtgattttttatgtttattttttttttttttggttagttttgtgcgtatgtttttttattttttattttttgggtttgtttttgtttttttttggatgtttttttattatttttttttttttattttttataaataaataatttaatttttttgtttttataaatagttttttttttgtttttagttattttttaagtttttttatgtgtttgttttttttttgtgtgtggatttaggttttatttagttggtgggatagattaatagttttgggttgggaatttttaggtaggtttgaaatttttagttagatagatattagggatggtttagggaggtgtggttttttgggatgtttagaattttttttttgaaagtttcggtgatttgattagggaagatttgagttgttggaatggttaaaggagaggtggtgacgatttttgaaatggttagaatggaggtagaatggggagaaggttttgaaattaattattttttttttttggatttttttaagttttatagagcgaaggttttaaagaagatagtattagggttgaggattaggtgggggatgttatttgtgtgggtggatagttggtttttttgggtgagttggaacgtagtttcgtggtatatcgagtgtagttagggtttttgtagttttggatatattattttttgggagttgaggagaggtatatggaaggggtattgggaggagaagagttggattttatgggttaggtagagtggggaggaggtggttttgggagagtaggtttttttagagaagattatttgggagtagacgaagtagatgttattggtggggattaggagagaattgttgtttaaggagaaattattttggaggaaggtacggttcgtgtttgttttttagagtagtgagttttgtttgttggggttttttaggaagagttataggggatgggggtgggagattaggggtttggattagaggttttaatttttgaggaagtgggtattgaataattgagtttttgggggatggtagggggaggtataggagtgggttttttttgttttttttagcgtgggggaagttgggggagaggggtggatgtttgggtttttgaggtaggggtaggaggagagttggtggggatatgtttgggaggttaggtggatgtttattaatgaggtgagtagtaggtttgaggttgttgtgggtaagatgtattttggggtgttgacgggtagtttgggtagttgaaggtgtgaggttaatattagggagtttttaggggagaatagagttgaggggggttttagggtttaaggtttggttgagttattttagtagtttttatttttttgttgttttatttgggttttaggtagtagaattagtagtagttttagaaggaggaggtgtagggtggtgttatatatttttgggaggaagagacgtttaggtggtgttatggggagaatttgtagagaaagagagagagagagagagatagtgagcggggcggggtacgcggcggaagatagatttttcgttttgggagatagtatttttcgattttcgagagagagatcgatagagaaggggataagatgtagttagagaaattttaaggtgagtagagggagatagagagagataggaagggaatagagaggaattatggtagaaatagagaatgtgtgatagagataatgagattgatagatggagagttagagatagagaaggaaattaaaattaaatttattaaggtttaggtttaggtaggtcggggatttaggtagtaggtgtaggagggatcgaggtttaggtagagggtaggatattgcggggcggtagtttaaagtacgaagtacgggtagtttaaggagatggggtaggagagttttatttgttgtgtggagtttttgggttcggacgtttaggtttttttatagaggaagcggtagtggtagcgtggtaggtagcgggcgggttttaggtcggggttggggttcggggaagtttttagggtttagaagatattgttgttttagttaaaggtaggaaaggttgaggtttaggagagaattataggttgggggtttaggcgattgagttttgggaaagggagtcgggttaggggaatcgtgggttgggagggttagggagtggggttaggtttagagttttaaagaagggatagttaatttagagaggaggcggttgagtagttggggtgtgagttggaggttcggttttttgaagagtaattatatataatatttttgtatttttggttgagtataggtttttttttttgtttattttttttttttgtatttttgtttttgttttaaataatttaaattatatttgttttagtatacggattttttagtttatttggtaggttttatattaagaaggtttattatatattttttttatcggggatattttggtgtttgttttttgtttaggtgaaaatattaatggattttttttttatttttgaaagtgttttagtttggaagataaattttttggtttttttatttagagatgatgttggatagttaagtatgatgaggttttattttatttttgaaggatgttttttatttttttttgattttaggtggtttttatagaatagatttatataattttaaataaatatatattttaggattaatgtggtagatattttttaaagttttttataaaggaagttttagaattttatatgggtgaggtttaagggtggtgatttagggtggggtggggatagttaagggatttgttttgaagttgtatttgtagagttaatatattattttaaaattgttttaggtttggtgtagtggtttatatttgtaattttggtattttgggagtttgaggtgggcggattatttgaggttaggagtttgagattagttggttaatatggtgaaattttatttttataataaatataaaaattagttaggcgtgttggtgcgtatttgtagttttagttattcgggaggttgaggttggagaattatttgaatttgggaggcggaggttgtagtgagttaagatcgtattattgtattttagtttgggggatagagtaagattttgttttaaaaaaaaaaaaaaaagtttttaaaattttttttttttttattgatatgtaatttaggtatgaggtggatattttttaagtgtatagttgatgaatttttttatttgtatgtagttattatttagttttacgtatttttaggtttttagtaggtttttttatgttttttttttgttgatattttttaaagataattaattatttttttatttttattattatagattatttttttttggtttggggtattatataaatgaaattatatagaatgtatttatttttgtttgattttttttagttagtattatgtttgtgagatttatatacgtggttgtatgtattagtaatgttttttaaaaaaattatgatgtaatattttattgtattaatatattttaatatattttgttgatggggatttggtttgtttttagtttttgtttaatataaaaaatgtttaatacgaatatttttatatatgagtttatttttatttagtttgtaagttataaggtttaaaaaaagtagtttttaaagatgattttatttattttttttaagtttgagataatattaatttgttattttaaatattattattgttattgatgtgattttatttggagagtgttagaggggttggagttggggttggtggtgattcggggtaaagtttattgttgtatggggtagattatttttttttttaggtataaggtttttgaggggttttggtgtaatatggagggatatgtaagtaatattttgggtgtgtatgagttattttttttgtttttttttatttgaggatttgtttttttgttttttatgttttattagttttagttattatttttgtaggggtagaaaggggtgatttttttttgatttattataagggttatggttaatatttttataataaaagatagattaataagagaaaagtataatatatttatttaattaaagttttaggtgatatgggagtttttagaaatgaagatttaaggatttaggggaaaattatttttatgtttagatttgatgaagaatgaatagttgtgtagaaatgtaattgaataaaaggagtattatttaatggttatagattgggattggggggattttagtaaggtttggttatattttttttggtttttttgtatagtattttttttttttaggtatagggtagaattttttttggaatgagggttttataatttattattagatgagataggttagaaaatttttttttttttttttttttttgagatagttttttattgtcgtataggttggagtgtagtggtacgattttggtttattgtaatttttgttttttaggtttaagttatttttttgttttagtttttcgagtagttgggattataggtatacgttattaagttcgttaaatttttttttgtatttttagtagagacggggttttattatgttggttaggttggttttgaatttttgattataggtgatttattagttttggttttttaaagtgttgggattatgggcgtgagttattgcgtttaattttttttttatttttttaattttattattttttgtgttagtgtgggttttttttttagtttttgtttttttttttttttttgtgttgtttttttttttagggttttttttgttttttgttgtttttttttgtttttttaatggtatgagttgatggattgggattttagttgagttatattaaaatataaaatgttattataaggttaggagtagtggtatatgtttgttattttagtattttgggaggttgaggcgagtagattataaggttaggagatagagataattttggttaatacggtgaaattttattattgttaaaaatataaaaaattagtcgagtatggtggtacgcgtttgtaattttagttattagggaagttgaggtaggagaattgtttgaatttaggaggcggaggttgtagtgagtcgagatcgtgttattgttttttagtttgggtaataaagtgagattttattttaaataaattaattaaaaaataaaataaaataaaataagtaaataaaaaaaggtattgtaattaatagtgagatatagagagaaatttaaattaaagaggaagaatgggatattgaaagataaaaaagggaaggtaagaagggtgatggggagatatgagagatatagaggaaggaagggtaagattgggttgaggtttagtgttacgtgtatgtgagatatgcgaaggatgttttttgagatgggttaattttggttttaattttagtttcggaggttgtatgaatttggttttttttttgggtaggttagtagttggtttgggattttttttgggtgggagagttgatgattggagttttgtgttttagatttagggaaatatagtttttatagtggtttttgtggagaaattagtgaaatttttgaagtttttaaatgagattgaaatgatattagttttaaatttgaatttagttttaaaatttgaattgggatttaatattaatattaattttaatttaaatttaattttaatttaaattataatttaaatttaattttaattgtaattttaattttaaatttaaatatattttaattaataattttttaaataaaattttttttttattttaatttaattttgtttttagggttaattttgaaattagtttattattatttttaatattaaatttaaatttgattttaaatgtaagtttaatttgagttataagtttaaagttgaattttattttgttttatgaattatttatttatttttttatttagtgagtatttgcgtgtttaatatatgttgggtattgttttaaggtaggagggatatggaggtaaagggattagagaaggtattagtatttgtggagtttgtattttagtgaggttagacggaaaagaaagaaattgaagaagaaattggtattatgagaaaataagataggttgatgttgtaagagtggtagggagttatttttaaatatagtagttagtaaaattttttttgagtgtttgggtggtattggagttgagatttaaatgataaaaaatagtgattaggtaaaagtttgggagtaaagtattttaggtaaagggagtagttattgtaaaggttggaaggcggaattaagttgggggtgttgacgataaatagaaggttagtgtggttggagtagagagagagattgggaggcgggtgggagatgaggttagagaggagggtaggggttaggttatgtagggttatgtaagaagggtaaagtttttagattttatttagttataggaagtttttaaaggtcgttagagtgtgtggtgcgtgtatgcgtgcgtgtgtgtgtgtgtgtgtgtgtgtgttgtaggggagagagggggagggagagagagagagagagagaaagagggaggtgagtagaggtgattggattttttttttttttgatatggtgttttgttttgtggtttaggttggagtgtagtggtattattatagtttattgtaattttaaaattatgggtttaagttatttttttattttagttttttaagtatttaggattataggtgtgtgttattgtgtttggttaattttaaaaaatattttaaaatttttgttgagatagggtttatgttgtttaggttggtttcgaatttttggttttaagtgatttgtttattttggttttttaaagttt

SEQ ID NO: 535 - DNA, 6626 bp, Artificial Sequence
  chemically treated genomic DNA (Homo sapiens)
agggtttttttgtattaatttaatagtattaaaaaagtagaaataatttaaatgttttaatagttggttattggttaaatgaaatgtagtgtattgatgtatagagattttaatttattttttaaatgaggtagttttatatgtattatttattttgaagggatgtttaagaaatattgttaaatttaaaagtgttgtagagtaatatgtattataagattatattggtataatagtaataaatagtatttttttatataattttaaaaaaatatatagatttatgttaagtattagttaagatgtttggtatatggtaggtatttaatatttaatgaatatatgtagaggatttttattttttattttatattttttggataagattttgaatttttatgagtatgtattatttaaatttagatttatagggagtgatggaaaatgtgaaaataaaattttaaaaaggaaaagaaagagtaaagatttagatttaaaaaaggaaatgtaaataagatgaaatagttaaagataggtttttttaaaattaatgttgagataatgttattagtagtgatagttagttaagagatggttcgtagtttattgtttagtattgaggtatttagtaggggttgtatttaatttttaagttggaattaatcgaaattgttgggtttgaagagttgtttttatgagttatcgacggtagaaagtatagaagtattaaagaaaataatttagaaatgtggaaagagaaaagtatgtttttgttttgggagaataatatttgtgtgtaattaagtaggaagattttgtggaggaaagtttgaaaaagtagagagttgaagagaaaagagttaaatgaaggatacggtggttaatatttaaagtaaaaagatatttttgaagaagatgtgtttttagggtttttaagaagtcgttatatttatgtttagagttattttgtaagtttatttggaaagtgtattggtgttttttggtataagatttacgaatattaatagttttgttatgtgagtaggtgtttatattgaagggttataagtaaagtttttatgtgttattattgttagaatttttttcgtttttttttaatataaaagtagttttgtttgttagtatggaagttttgggaagagttttatatttgtttcgtgttgttaatatttttgttttggtttttttgttggaatatataagttatttagtattagttatttatttttttggtagaattgtggtaagaggggattaatagggaaaaaaaattaaaaaataaataaaaagttaaaataatatgaaagagttgggtatgtttttaaaataattagtgtttattttttttagttttgtgtttgtgtttgtttgtattttgtatgtttgtttttgtggtggggggggatatgtttgcgtttttgaaaatttttttatttagatattataaggtattagtttaattttgaatatagtcggttgtagtacggtgtatagatacgattgttttttttttagaaaattttttagtttaaatatgtttgtagagtatgatttatggtgtttttttttggattgtttagtgggtaattgttgtacgaaaattagagaaatagatgtagattttgaattttggttataaatttttgttttatgattatgggttttaaatgtgttgtgttatattgataaatatatagttattttgaaataaaatggattttatttttaaagttttgttttttgttttttattttttgtttgtttgttggttggaaatatatttattagattattgattaaatataaagaaaatagagatgatatatattagaatgttattttatgttataataagaagatatttgggaaagttttttttaattttgtggttaatgtttaaaatgggtgttagtagtttatattttattacggataaatcggtttattttttattttttattttatttattaatttttatagtgtacggatttgtatttaaagaattatggtttatttatgtattttttttttattttatttaaaatgaagaatttggagatagaattaagtttttaagaagtgtaagtatttattgatgaagaaataattagtatgtggttaaattatgggtttgttttataaattaatatttggattaagtaatagttttaattattgttattagtataattaatttatgatgaggaatgattaattgattagcgaatattgttatattataagaaatttatattattttttttatggggatttaaatattgattatttattttaaggtttaagtttattttttagttgagaattttaaggtaattatatattttatatttttttgtataaagaaagaaaatatcgagtcgtttaatttttattatatatagagagagatatattaatgttgttatttttgtgtaatgatatagtatagaggtaagaaattcggaagtagtggtttcgtttaatgaggttgattttatagtttaagaaatgagaatgaatagaattttgaggatatttatttttatttttatttttttgggattagtgtatttttattttttggagagatgttaagtaagaatgtgtagtagttttttttggataatagatttttgtatatatatatttgttagtgatgttatgttttttatttttaatttaagttttttttgttttatttttaatatagttgttttttttttttttgtttaataattttttatttatttttattgttcggtaaaaatgaatttagtttttaaggaattttaaggattttaaataagtatttggagttataagttttatggattaagtagaaattggtatataatgtagtgttttgtgtatttttataattattttaatgatagtgtgttaaatgttttgtaaatttttttgtgtttttttgtttaaaatgtgtgttttttttgtagttaaagggttttttataataagtttttgttataaaatgatggttatataaaagagagaagagaggcgtaaaaataataaatatagatttagtaaaaattttatttttttattgttttgaattttttaatagtaagaattgagtttgttgggttgaaaattgttttaatgtatttttataaaaggatttttgatttggtaagtgtgtgcgatgtatattttttatgttatattataagtgttatttagtaattttattagatagggtagtgttttagtatggggtggggtgttttttgataggtttttaaaaggttcggatgttaatgtatattttaatattatttataaaaaggagattggagtagtgtttttttttgtattgggtaaggagattttttttttttgtttaattatttgtttgttttgttttgtgggagaattataagtaaatgttatagaggtagtggagaaaaaagggtgttttaatttttttttagagttttttttatttgatgtatgttgtattttttaaataagttgtgtaaaatggttgtagggtagattggtttttttttttaaagttttttattcggttgggtttatttgtaaatattgtatttattttttttagtgttttaggattggttggaaagatttttttttttgtaggttgggttagtgtgagagatttaaaaaattatttttttttaaaattattgtattttaataaaaggattgggtaggggttggaatgagagaaaattggttttttaaaatgtaaaattgttatatttaaattagtttataaaatatgcgtttaattatgtggtgggatgtgtgtaggtgtatgatgagagaggtaattaatatggttatttggggtgtaaggatgtgggaataggtaagtaatttttatattggatttttattttagggagttgggttttagttatagttttgagttgtgtgattttgggtaggttttattttttcggggttttgttttattagttgaatagtatgaggatgagttatagttaatatttgttttatgatatttatttagtattatataagtgttatttttgtttttttagttaatattgacgtgggtagtattatatgtttattttatagatgaggaaattgaagtttgaagaagttaaatatttattttagaatatatagttggtaagtggtagatttggaattggaatttagtttagtttgattttttaatttatgtttttgattattatattgtttttttaagtttagatttgaaattttattttttgtgtggttgtgtgtttgggataggggtaattaatttttgattattttatatgttgtatagaatttggagaggattttttaaagtaaatgaatttcgaaagttggattgtagagtaaacgagtgtagttaatttagttaggggtttgtaagagggagaaagagaaaaagattgtggaatggaaagttttttaatttaagttttttttaaggggtagttattttttgttttatagtttagggtttgtatgtgttttttttggagtggaaaaatatataagttataaggaatttaatagatagaaaggcgtatagaggaatttaaagtgtgggttggggggcgaggcggtgggcgggaggcgagcgggcgtaggcggaatatcgttttttaagttaagtcgtcgtaaataaaaaggcgtaaagggagagaagttggtgtttaacgtgagttaggagtagcgtttcggttttttttttgtttattttaaaagtattttttgtattgtttttaaggtgagaaataggaaagaaaacgtcggtttgtgcgttcgttgtttgtttttttggttgtttgtttttgtagggttgttgggagtttttaagttttgtgagaattttgggagttggtgatgttagattagttgggttatttgaaggttagtagttcgggtagggtttatcgaaagtttattcgtatatattaggtaatttaattttttattttgtgtgatagaagtagtaggaagtgagttgtttagaggtaggagggtttattttttgttaaaggggggattagaatttttttatgcgagttgtttgaggattgggatgtcgagaacgcgagcgattcgagtagggtttgtttgggtatcgtcggggtaggattcggaacgtattcggaaggttttttgtaagtatttatttggaaggagaatttgggatttttttgggaatttttcgtttcggttggattggtcgagtaagtttggaaaatggtaaatgattatttggattaattataggtttttagttggtttgtttgttataatttatgattcggggttgggaaaaagattaatagtttacgtgttaaaaaaggggtagagtttgatggagttgggtggatttttttatgttatttgtttttatatttagaggataagtatttttgtagatatttagtgtaagggagattatgtttgattgtatggatgttttgttagtgagttttgggtaaattttggatttttatattgcgagttcgtttttttgtatgttttaggagaaagtttttaaagtatgttttagtggattgatttaaatcgaatggtagtatcggtatattgtttaatgtaggtttatttttttttttttttttattaagaaaaaaaaaattgttttttttgtatgtaataaagacgttggaaataaattgtattggtagtaagataaaggatttaatgatttaatgttgaaggggtgtgatatgttggtatgtatattgattttttttgttgaaaattttttgttagatgttttttttttaaataatttttttcgtttttatgtttttttttttattaattttatagttttttgaaaatagtttttaaaatatgtataaaaatgtggggggtggggagtagagggtgattataagattttaaaatattttttaagtagggtaatttgatatattttgtagtttttattaaaatgtatgtagagtggaatttaattttgttgttttttggattagttattagttgtataggtttttttattttttgtgtattttaatagtttaaagtaattaaaatatgatattttttttgaaaggaatttagtttaattaaggtggttgttgttttcgaagtttataaattattagtttaagttgtcgtttttaatgttttttttgttaaggaaaggtaatattttttagtattgattttgttgttatttttttaagttattttgttggtttaagaagttgttgttttgttagaaaattattggtaatgaatattttttggattgagttatttattatttttatattttgtagtttagttcggaacgtggatattagttaaaggaaaggaaatataagtggggtagtttaatttaaaaaaaaaatattgattattttgttatttgatgttgatatagtgtcgaggtacgtatttggttaatagtagtttggttgtaggtttgagaaatgattaggagttttagaaaattttattttcgggtggttgtagtgggagtttgtaggatgtttcgtcgttttgatagtgatttagataaatggtttagttatttattaaaatgtttttagtattttatttg

SEQ ID NO: 536 - DNA, 6626 bp, Artificial Sequence
  chemically treated genomic DNA (Homo sapiens)
taaataaagtattaaaaatattttgatagatagttgagttatttatttaaattattgttagggcggcgaagtattttgtaggtttttattatagttattcgaaggtgggattttttgggatttttgattattttttaagtttgtagttaggttattgttgattaggtgcgtatttcggtattgtgttagtattagataataaaatagttaatattttttttttaaattgggttattttatttatatttttttttttttaattgatgtttacgtttcgggttgaattgtaagatatggaaataatggatggtttagtttaaggggtgtttattgttagtagttttttagtaaaatagtaattttttagattaataaagtgatttggaaaggtggtagtagggttaatgttaagaaatattgtttttttttagtaaggaaaatattggaagcggtagtttgaattggtggtttatgaatttcgggagtagtagttattttaattaaattaaattttttttaaggaaaatgttatattttaattattttggattgttggaatatataaggggtggggggatttatataattagtagttaatttaaagaatagtaaagttaaattttattttgtatatattttagtaaaaattgtaaaatgtgttaaattgttttatttgaagaatgttttaaagttttgtggttattttttattttttattttttatatttttatgtatattttaaaaattgtttttaagagattataaggttggtaaggagaggagtatgggggcgggaggggttatttgggaagaaaatatttaataggaaatttttagtaaagggaattaatatgtatgttagtatattatatttttttagtattaaattattaaattttttgttttgttattaatgtagtttatttttaacgtttttattgtatgtaagagagataatttttttttttttggtagaagaagggaaaaaaataaatttatattgagtagtgtgtcgatgttgttattcggtttgggttaatttattgaagtatgttttgagagtttttttttggagtatgtaggaagacggattcgtagtgtagaaatttaggatttgtttaggatttattgatagaatatttatatagttaaatatgattttttttgtattgaatgtttgtaaaagtgtttattttttaggtgtggaggtaaatggtatagaaaagtttatttaattttattaaattttgttttttttttggtacgtaggttgttggttttttttttagtttcgaattatgaattatgatagataagttagttaaaagtttgtaattgatttaaatgattatttattattttttaggtttgttcggttaatttagtcggggcggggggtttttagaaagattttaagttttttttttaagtaaatgtttgtaaaaagtttttcgaatgcgtttcggattttatttcgacggtgtttagataaattttgttcggatcgttcgcgttttcggtattttagtttttaaatagttcgtatgggggaattttggttttttttttggtaaagaatagatttttttgtttttgaatagtttattttttattatttttgttatatagaatgaaagattgaattgtttaatatatgcgagtgaattttcggtgaattttattcgggttgttaatttttaaatgatttaattagtttgatattattaatttttaggatttttatagagtttaaaaatttttagtagttttgtaaaagtagatagttagagaggtaggtagcgagcgtataagtcggcgtttttttttttattttttattttaaaaataatataagaagtgtttttaaaatgagtaggggaggagtcgggacgttgtttttggtttacgttgagtattaatttttttttttttacgtttttttatttgcggcggtttagtttggaaaacggtgtttcgtttgcgttcgttcgtttttcgtttatcgtttcgttttttagtttatattttaaatttttttgtgcgtttttttgtttgttaaattttttataatttatgtatttttttattttagaaaaagtatatgtaagttttaaattgtagaatagagaatggttattttttgggaaaggtttgggttgggaaattttttattttatagttttttttttttttttttttttgtaagtttttggttgaattgattgtattcgtttgttttgtaatttagttttcgagatttatttattttgaaaaattttttttaggttttatgtagtatatagagtagttaggaattggttatttttgttttaaatatatagttatatagaaaatgagattttagatttggatttgaaaaaatagtatagtggttaagagtatgggttggggaattaaattgaattagattttaattttaggtttgttatttattagttgtgtgttttgggataagtatttaatttttttaggttttagtttttttatttgtaaaatgggtatataatattatttacgttagtgttaattgggaggatagaaataatatttgtatggtgttgggtaaatattatggaataaatgttagttgtgatttatttttatattgtttaattggtgaaataaaatttcggggagatgagatttatttaaggttatatagtttagagttgtgattagaatttagttttttaggatgaaagtttaatgtgaaaattatttgtttgtttttatatttttgtattttaaatagttatgttggttgttttttttattatatatttatatatattttattatataattaaacgtatattttgtaaattggtttaagtatgatagttttatattttgaaggattagtttttttttattttagtttttgtttaatttttttattaaaatatagtaattttaagggaaaatgattttttagattttttatattgatttaatttataggaagaagagtttttttagttagttttaaaatattaagaaggatagatgtagtatttataaataaatttagtcggatggagagttttaaaagggagagttaatttattttgtagttattttgtataatttgtttaaaggatgtaatatatattaaataaaggaaattttggagaggaattaaaatatttttttttttttattgtttttgtagtatttatttgtaatttttttataaaatagggtaggtaagtggttaggtagggagggagagtttttttgtttaatgtagggaagagtattgttttagttttttttttgtggatagtgttggaatgtgtattggtattcgggttttttaaaagtttgttagggggtattttattttatgttgaaatattgttttgtttagtggagttgttaagtggtatttgtggtgtaatatgaaaagtatgtatcgtatatatttattaagttaaagatttttttatgaaggtatattaaaataatttttagtttagtaagtttagtttttgttattgaaaagtttagggtaataaaggggtgagatttttgttgaatttgtgtttgttatttttgcgtttttttttttttttttatatggttattattttgtaatagagatttattgtaagaaattttttaattataaagaaaatatatattttaagtaagagaatatagaggaatttataaaatatttaatatattgttattaaggtagttgtaaagatatataaagtattatattatgtgttaatttttatttggtttatgaggtttatggttttaaatgtttatttaaggtttttagagttttttggaaattgagtttatttttatcggatagtggaggtggatgaaaagttgttagataagagaagaggaaatagttatattggaagtagagtaggagaaatttaagttagagatgagaaatatggtattattgataggtatgtgtgtatagggatttgttatttaggggaggttgttgtatatttttgtttaatatttttttaaagagtagagatgtattggttttagggaagtgaagatggggatgggtgtttttaaaattttgtttatttttattttttaagttatggaattagttttattgagcgagattattgttttcgaattttttatttttatattgtattattgtataaaaataataatattagtgtgtttttttttgtgtgtggtaaaggttgggcgattcgatgttttttttttttgtgtaagaaaatgtaaaatatataattattttgaagtttttaattgagaaatgaatttgggttttgaaatgaataattagtatttaaatttttatgaaaggaatagtatgggttttttataatatgataatattcgttagttaattaattattttttattatgaattaattatgttgatagtaataattagagttattatttaatttaagtattaatttataaaatagatttatgatttagttatatgttaattatttttttattagtaaatgtttatattttttgaaaatttgattttgtttttaaattttttattttaagtaaaatgaaggaaagatatataaataagttataattttttaaatatagattcgtgtattataaagattaatgagtagggtagaaagtgaaaaatagatcgatttgttcgtaatgaaatgtaaattattgatatttattttaaatattagttatagggttggaagaaatttttttaaatatttttttgttatggtataaaataatattttgatatgtgttatttttattttttttgtgtttgattaatgatttaataaatgtatttttaattaataagtaaataaaaagtgaaaaataaaaagtaaaattttgagagtaaaatttattttgttttagagtaattgtatatttgttagtgtgatatagtatatttgaaatttataattataaaataaaaatttatagttagggtttagggtttatatttgtttttttggttttcgtatagtaattatttattggataatttagaaagaaatattatgaattatgttttgtaaatatgtttgaattggagagttttttgaagaaagagtagtcgtgtttgtgtatcgtattgtagtcggttgtgtttaaaattgggttaatattttgtgatgtttaaataagaagatttttagaggcgtagatatatttttttttattataggggtagatatgtaaagtgtaggtagatataggtatagggttgggggaggtggatattgattgttttaaagatatgtttagtttttttatgttgttttggttttttgtttgttttttaattttttttttttgttaatttttttttgttatagttttgttagaagaataaatggttagtattgagtgatttgtgtgttttagtagggaagttaaggtagagatgttggtagtacgaggtaagtatgaggttttttttagggtttttatattagtaggtagagttgtttttgtgttggaagggagcgggggaagttttaatagtaataatatatggaaattttgtttgtggttttttagtatgaatatttgtttatataataggattgttgatgttcgtggattttatattaaaagatattaatgtattttttaaatgaatttgtaaggtggttttgggtatgagtatagcgattttttagaaattttagaaatatattttttttaaaaatgtttttttattttgagtgttggttatcgtgttttttatttggtttttttttttttagttttttgtttttttagatttttttttataaagtttttttatttggttatatataaatattgtttttttaagataagggtatatttttttttttttatatttttgaattattttttttagtgtttttgtgttttttgtcgtcgatgatttataaagatagttttttaagtttaatagtttcggttggttttaatttgaaagttaaatataatttttgttgaatgttttagtattgagtagtgagttgcgaattattttttagttgattgttattgttggtggtattgttttaatattagttttggggagatttatttttggttattttattttgtttatatttttttttttaaatttagatttttattttttttttttttttttaaaattttatttttatattttttattattttttataaatttagatttaagtaatatatgtttataaaaatttaaagttttgtttaaaagatataaagtgaaaagtaaaagttttttatatgtatttattaaatgttgaatatttattatgtgttaggtattttaattggtgtttggtatagatttgtatatttttttgggattgtgtgggggggtgttgtttgttgttattatattagtatggttttatgatatatattgttttgtaatatttttaaatttagtaatattttttgaatatttttttaaaataaataatatatatagaattattttatttaaaaaataagttagaatttttgtatattaatgtattgtattttatttaattaatggttagttgttaagatatttaggttgtttttatttttttagtattattaggttagtgtaaagaagtttt

SEQ ID NO: 537 - DNA, 20 bp, Artificial Sequence
  MYC primer
ttttgtgtggagggtagttg

SEQ ID NO: 538 - DNA, 21 bp, Artificial Sequence
  MYC primer
ccccaaataaacaaaataacc

SEQ ID NO: 539 - DNA, 18 bp, Artificial Sequence
  MYC oligo
taaggatgcggtttgtta

SEQ ID NO: 540 - DNA, 18 bp, Artificial Sequence
  MYC oligo
taaggatgtggtttgtta
